(19) United States
(12) Patent Application Publication
(10) Pub. No.: US 2023/0407320 A1
(43) Pub. Date: Dec. 21, 2023

(54) METHODS AND COMPOSITIONS FOR GENOME MODIFICATION

(71) Applicant: PIONEER HI-BRED INTERNATIONAL, INC., JOHNSTON, IA (US)

(72) Inventors: MAREN L. ARLING, DES MOINES, IA (US); WILLIAM JAMES GORDON-KAMM, URBANDALE, IA (US); JOSHUA K. YOUNG, JOHNSTON, IA (US)

(73) Assignee: PIONEER HI-BRED INTERNATIONAL, INC., JOHNSTON, IA (US)

(21) Appl. No.: 18/250,469

(22) PCT Filed: Oct. 27, 2021
(86) PCT No.: PCT/US21/72049

§ 371 Date: Apr. 25, 2023

Related U.S. Application Data
(60) Provisional application No. 63/107,363, filed on Oct. 29, 2020.

(51) Int. Cl. C12N 15/82; C12N 9/22

(52) U.S. Cl. CPC C12N 15/8205; C12N 2310/20; C12N 9/22

(57) ABSTRACT

Methods and compositions are provided for the transient expression and activity of site-specific DNA modifying agent, morphogenic factors or developmental genes, either alone or in combination for eukaryotic cells. The morphogenic factor and DNA modifying agent may be provided to the same cell or to a different cell than that which was originally transformed. The morphogenic factor, or the double-strand-break-inducing agent, may further comprise a cell penetrating peptide. Exogenously provided DNA modifying agents and/or morphogenic factors need not be segregated away in future generations due to transient activities in the desired cell.

### FIELD

[0001] The disclosure relates to the field of molecular biology compositions and methods for modifying a polynucleotide sequence, including the genome of a cell.

### BACKGROUND

[0002] Recombinant DNA technology has made it possible to insert DNA sequences at targeted genomic locations and/or modify specific endogenous chromosomal sequences. Site-specific integration techniques, which employ site-specific recombination systems, as well as other types of recombination technologies, have been used to generate targeted insertions of genes of interest in a variety of organism. Genome-editing techniques such as designer zinc finger nucleases (ZFNs), transcription activator-like effector nucleases (TALENs), or homing meganucleases, are available for producing targeted genome perturbations, but these systems employ designed nucleases that need to be redesigned for each target site, which renders them costly and time-consuming to prepare.

[0003] Newer technologies utilizing archaeal or bacterial adaptive immunity systems have been identified, called CRISPR (Clustered Regularly Interspaced Short Palindromic Repeats), which comprise different domains of effector proteins that encompass a variety of activities (DNA recognition, binding, and optionally cleavage).

[0004] Irrespective of the method used for CRISPR-based genome editing, undesired sequences (for example, helper genes, the endonuclease gene) can be integrated into the genome, requiring later removal through deletion or genetic segregation. There is a need for improved methods of genome editing and component delivery to cells. This is especially true in crops which have a long reproductive timeline, clonally propagated crops, crops which are recalcitrant to transformation, hybrids, or crops that have high genetic variation between generations. One of the benefits of methods described herein is that a genome can be edited. e.g., by introducing a new gene at a targeted locus (SDN3) without integration of a DNA modifying agent.

### SUMMARY

[0005] A method of modifying a target site in the genome of a plant cell, the method includes providing to the cell two distinct Rhizobiales bacteria, wherein the first of the two bacteria comprises a first vector, wherein the first vector comprises a heterologous polynucleotide, wherein the heterologous polynucleotide is flanked by polynucleotides comprising homology to a nucleotide sequence at the target site, wherein the second of the two bacteria comprises a second vector, wherein the second vector comprises a polynucleotide encoding a Cas endonuclease, a guide RNA, at least one morphogenic factor, and an anti-regeneration factor; wherein the ratio of the amounts of the first vector and the second vector or the ratio of the amount of the two distinct Rhizobiales bacteria is approximately 1:1 to about 10:1, and wherein the Cas endonuclease creates a double-strand break at or near the target site of the plant cell but the polynucleotide encoding the Cas endonuclease does not integrate into the genome of the same plant cell.

[0006] A method of modifying a target site in the genome of a plant cell, the method includes providing to the cell at least two distinct Rhizobiales bacteria, wherein the first of the two bacteria comprises a first vector, wherein the first vector comprises a gene encoding a guide RNA and a heterologous polynucleotide, wherein the heterologous polynucleotide is flanked by polynucleotides comprising homology to a nucleotide sequence at the target site, wherein the second of the two bacteria comprises a second vector, wherein the second vector comprises one or more polynucleotides encoding a Cas endonuclease, at least one morphogenic factor, and a gene conferring anti-regeneration properties; wherein the ratio of the amounts of the first vector and the second vector or the ratio of the amount of the two distinct Rhizobiales bacteria is approximately 1:1 to about 10:1, and wherein the Cas endonuclease creates a double-strand break at or near the target site of the genome of the plant cell but the T-DNA comprising the Cas endonuclease does not integrate into the genome of the same plant cell.

[0007] A method of modifying a target site in the genome of a plant cell, the method includes providing to the cell one Rhizobiales strain comprising first and second binary plasmids, wherein each of the two binary plasmids comprise distinct T-DNA sequences, wherein the first binary plasmid comprises a low-copy ORI, and a T-DNA encoding a Cas endonuclease and a morphogenic factor, wherein the second binary plasmid comprises a higher copy ORI and comprises a T-DNA encoding a heterologous polynucleotide, wherein the ratio of the amounts of the first plasmid and the second plasmid is approximately 1:1 to about 1:10, and wherein the Cas endonuclease creates a double-strand break at or near the target site of the plant cell but does not integrate into the genome of the same plant cell.

[0008] In certain embodiment, the heterologous polynucleotide is integrated through site-directed homologous recombination. In certain embodiment, the plant cell is a monocot cell or a dicot cell. In certain embodiment, the morphogenic factor is Wuschel. In certain embodiment, the Cas endonuclease comprises fewer than about 1500, 1200, 100, 800 and 500 amino acids. In certain embodiment, the heterologous polynucleotide is a template for homology-directed repair of a double-strand break at the target site. In certain embodiment, the at least one of the Rhizobiales is Agrobacterium. In certain embodiment, the heterologous polynucleotide is a donor polynucleotide for integration at the target site.

[0009] A synthetic composition comprising two distinct Rhizobiales bacteria, wherein the first of the two bacteria comprises a first vector, wherein the first vector comprises a heterologous polynucleotide, wherein the heterologous polynucleotide is flanked by polynucleotides comprising homology to a nucleotide sequence at the target site, wherein the second of the two bacteria comprises a second vector, wherein the second vector comprises one or more polynucleotides encoding a Cas endonuclease, a guide RNA, and at least one morphogenic factor; wherein the ratio of the amounts of the first vector and the second vector is approximately 1:1 to about 10:1.

[0010] A synthetic composition comprising two different Rhizobiales bacteria, wherein the first of the two bacteria comprises a first vector, wherein the first vector comprises a gene encoding a guide RNA and a heterologous polynucleotide, wherein the heterologous polynucleotide is flanked by polynucleotides comprising homology to a nucleotide sequence at the target site, wherein the second of the two bacteria comprises a second vector, wherein the second vector comprises one or more polynucleotides encoding a Cas endonuclease and at least one morphogenic factor; wherein the ratio of the amounts of the first vector and the second vector is approximately 1:1 to about 10:1.

[0011] A synthetic composition comprising one Rhizobiales strain comprising first and second plasmids, wherein each of the two plasmids comprise one or more distinct T-DNA sequences, wherein the first plasmid comprises a low-copy ORI and comprises a T-DNA encoding a Cas endonuclease and a morphogenic factor, wherein the second plasmid comprises a higher copy ORI and comprises a T-DNA encoding a heterologous polynucleotide, wherein the ratio of the amounts of the first plasmid and the second plasmid is approximately 1:1 to about 1:10. In certain embodiments, the synthetic composition is a plant cell. In certain embodiments, the plant cell is a monocot cell or a dicot cell. In certain embodiment, the at least one of the Rhizobiales is Agrobacterium. In certain embodiment, the Cas endonuclease comprises fewer than about 1500, 1200, 100, 800 and 500 amino acids. In certain embodiments, the synthetic composition further includes an anti-regeneration factor. In certain embodiments, the plant cell comprising in its genome the polynucleotide encoding the Cas endonuclease is not selected due to the presence or activity of the anti-regeneration factor. In certain embodiments, the Cas endonuclease is a Type II or Type V CRISPR-Cas endonuclease.

[0012] In certain embodiments, the plant cell is a haploid plant cell. In certain embodiments, the plant cell is a haploid plant cell and the DNA modification happens before or during chromosome doubling stage. In certain embodiments, the at least one of the Cas endonuclease, the morphogenic factor, and the anti-regeneration factor the plant cell comprises a heterologous cell penetrating peptide (CPP) or an intracellular transfusion domain.

[0013] A method of modifying a target site in the genome of a plant cell through endogenous activation of one or more genes, the method comprising providing to the cell (a) a first polynucleotide encoding a deactivated CRISPR-Cas polypeptide (dCas) that is capable of site-specifically binding to an endogenous target site comprising a polynucleotide involved in cellular regeneration, but incapable of introducing a double-strand break at the endogenous target site, wherein the dCas is operably linked to a transcriptional activator, the transcriptional activator capable of increasing the expression of the polynucleotide involved in cellular regeneration; (b) providing a second polynucleotide comprising a heterologous polynucleotide flanked by polynucleotides comprising homology to a nucleotide sequence at the target site to be modified; (c) providing a third polynucleotide encoding a Cas endonuclease, a guide RNA, and an anti-regeneration factor; wherein the ratio of the amounts of the polynucleotide comprising the Cas endonuclease and the polynucleotide comprising the heterologous polynucleotide is approximately 1:1 to about 1:10, and wherein the Cas endonuclease creates a double-strand break at or near the target site of the plant cell but the polynucleotide encoding the Cas endonuclease does not integrate into the genome of the same plant cell.

[0014] In certain embodiments, the dCas is fused to a transcriptional activation domain capable of initiating transcription from an endogenous morphogenic gene is WUSCHEL, BBM or a combination thereof. In certain embodiments, the polynucleotides are provided through one or more strains of Rhizobiales. In certain embodiments, the polynucleotides are provided through particle bombardment. In certain embodiments, the polynucleotides are present in one or more T-DNAs in the same Agrobacterium strain or two or more distinct Agrobacteria strains. In certain embodiments, the dCas polypeptide is a Type II or a Type V CRISPR-Cas polypeptide.

[0015] A synthetic composition comprising (a) a first polynucleotide encoding a deactivated CRISPR-Cas polypeptide (dCas) that is capable of site-specifically binding to an endogenous target site comprising a polynucleotide involved in cellular regeneration, but incapable of introducing a double-strand break at the endogenous target site, wherein the dCas is operably linked to a transcriptional activator, the transcriptional activator capable of increasing the expression of the polynucleotide involved in cellular regeneration; (b) providing a second polynucleotide comprising a heterologous polynucleotide flanked by polynucleotides comprising homology to a nucleotide sequence at the target site to be modified; (c) providing a third polynucleotide encoding a Cas endonuclease, a guide RNA, and an anti-regeneration factor. In certain embodiments, the one or more of the dCas is fused to a cell penetrating peptide.

[0016] A method of regeneration of a genome modified plant, the method comprising providing one or more polynucleotides that encode a site-specific DNA modifying agent and optionally, a morphogenic factor to a plant cell, wherein the DNA modifying agent and optionally, the morphogenic factor diffuses or is transported into one or more adjacent plant cells; modifying the genome of the one or more adjacent plant cells; regenerating the one or more adjacent plant cells into one or more genome modified plants, wherein the one or more genome modified plants do not comprise the polynucleotide sequence encoding the DNA modifying agent and optionally the morphogenic factor in the absence of a separate segregation step by crossing with another plant. In certain embodiments the DNA modifying element, the morphogenic element and other exogenously introduced DNA sequences need not be removed (e.g., through targeted deletions, or through genetic segregation through back-crossing or other breeding methods) due to the altruistic nature of editing nearby or neighboring cells. These methods help reduce the amount of time required to develop a genome edited line for product development by reducing the need for genetic segregations.

[0017] In certain embodiments, the DNA modifying agent is a CRISPR-Cas polypeptide that is capable of moving from one cell to another as a polypeptide or in the form of an RNA sequence capable of being translated into a polypeptide. In certain embodiments, the DNA modifying agent is a CRISPR-Cas polypeptide and is operably linked to a cell penetrating peptide. In certain embodiments, the optional morphogenic factor is operably linked to a cell penetrating peptide. In certain embodiments, the cell that receives the polynucleotide encoding the DNA modifying agent is not selected, but the genome modified cell is regenerated into a genome modified plant. In certain embodiments, the DNA modifying agent is a CRISPR-Cas polypeptide and the guide RNA is encoded by the same polynucleotide that encodes the CRISPR-Cas polypeptide. In certain embodiments, the DNA modifying agent is a base editor.

[0018] In certain embodiments, the optional morphogenic factor is encoded by an expression construct that is distinct from the polynucleotide that encodes the DNA modifying agent. In certain embodiments, the polynucleotide that encodes the DNA modifying agent, a guide RNA and the optional morphogenic factor are present in one or more distinct expression cassettes. In certain embodiments, the DNA modifying agent is a CRISPR-Cas deactivated polypeptide (dCas). In certain embodiments, the methods or the compositions disclosed herein further include a heterologous donor polynucleotide.

[0019] In certain embodiments, polynucleotide that encodes the DNA modifying agent and the optional morphogenic factor are present in the plant cell at a ratio of about 1:1 to about 1:5, 1:8, 1:10 and to about 1:100.

[0020] In certain embodiments, a heterologous polynucleotide is initially integrated into the nucleus where it is either transiently expressed, then degraded, or stably integrated at a specific locus. In some embodiments, a first viable plant containing a genomic DNA is provided that contains a donor DNA flanked by a plurality of recognition sequences and the plant genomic target locus, wherein the plant genomic target locus also contains at least one recognition sequence. In some embodiments, a second viable plant containing a site-specific nuclease is provided. In some embodiments, the first and second viable plants are crossed to produce F1 seed. In some embodiments, the site-specific nuclease is expressed and cleaves at least one site specific nuclease recognition sequence to release a donor polynucleotide and to create a double strand break within the plant genomic locus. In some embodiments, the donor DNA is integrated within the plant genomic locus. In some embodiments, the donor DNA is integrated within the plant genomic locus via a non-homologous end joining mechanism. In some embodiments, the donor DNA is integrated within the plant genomic locus via homology-directed repair.

### BRIEF DESCRIPTION OF THE DRAWINGS

[0021] The disclosure can be more fully understood from the following detailed description and the accompanying drawings, which form a part of this application.

### FIGURES

[0022] FIG. 1 is a schematic illustration of a transformation cassette used. The following references related to the identified parts of the figure. A: Zea mays UBI promoter; B: Zea mays UBI 5′ UTR; C: Zea mays UBI Intron 1; D: Zea mays optimized A40G+E81G+A87K+D228A+T335R nuclease inactive or dead (d) cas-alpha 10 gene including ST-LS1 Intron 2. A40G+E81G+A87K+D228A+T335R is comprised of alterations that enhance the cellular activity of Cas-alpha 10, A40G+E81G+A87K+T335R, plus an additional change that abolishes target cleavage, D228A; E: Zea mays optimized sequence encoding SV40 NLS; F: Zea mays optimized sequence encoding a glycine, arginine and alanine linker; G: Zea mays optimized sequence encoding the carboxyl terminal acidic transcriptional activation domain of the cold binding factor 1 (CBF1) protein from Arabidopsis thaliana; and H: Zea mays UBI terminator.

[0023] FIG. 2 is a schematic illustration of a cassette used in the methods disclosed herein. The following references related to the identified parts of the figure. A: Zea mays UBI promoter; B: Zea mays UBI 5′ UTR; C: Zea mays UBI Intron 1; D: Zea mays optimized A40G+E81G+A87K+D228A+T335R nuclease inactive or dead (d) cas-alpha 10 gene including ST-LS1 Intron 2. A40G+E81G+A87K+D228A+T335R is comprised of alterations that enhance the cellular activity of Cas-alpha 10, A40G+E81G+A87K+T335R, plus an additional change that abolishes target cleavage, D228A; E: Zea mays optimized sequence encoding SV40 NLS and F: Zea mays UBI terminator.

[0024] FIG. 3 shows five different transformation regimens that were tested for delivery of constructs herein. Each regimen 1-5 indicates heat treatment duration, number of heat treatments, and when (days after construct delivery) heat treatment (if any) was administered.

[0025] FIG. 4 shows the average number of anthocyanin positive cells expressing dCas-alpha 10-CBF1 resulting in a dimer comprised solely of dCas-alpha 10-CBF1 monomers as compared to a mixture (heterodimers) of dCas-alpha 10 and dCas-alpha 10-CBF1, each with respective sgRNAs.

### REFERENCE TO SEQUENCE LISTING SUBMITTED ELECTRONICALLY

[0026] The official copy of the sequence listing is submitted electronically via EFS-Web as an ASCII formatted sequence listing with a file named 8189-WO-PCT_ST25.txt created on Oct. 26, 2021 and having a size of 648 kilobytes and is filed concurrently with the specification. The sequence listing comprised in this ASCII formatted document is part of the specification and is herein incorporated by reference in its entirety.

### DETAILED DESCRIPTION

[0027] Methods and compositions are provided for the transient expression and activity of site-specific DNA modifying agent, morphogenic factors or developmental genes, either alone or in combination for eukaryotic cells. The morphogenic factor and DNA modifying agent may be provided to the same cell or to a different cell than that which was originally transformed. The morphogenic factor, or the double-strand-break-inducing agent, may further comprise a cell penetrating peptide. Stable integration of DNA is inhibited through the use of a low constitutive promoter driving an anti-regeneration gene. Transient expression of the anti-regeneration gene does not kill the cell, but stable integration inhibits regeneration, or is lethal. Transient expression of and activity of both double-strand-break-inducing agent and morphogenic factors are sufficient to provide editing for SNP conferring resistance, SDN2, or SDN3 of a selectable marker and trait of interest.

[0028] Compositions are provided for Cas endonuclease-mediated genome modification. The present disclosure further includes compositions and methods for genome modification of a target sequence in the genome of a cell, for gene editing, and for inserting a polynucleotide of interest into the genome of a cell.

[0029] In certain embodiments, the amount of the various components (DNA modifying agent: morphogenic factor; or donor polynucleotide: morphogenic factor; or Cas enzyme/gRNA: morphogenic factor; or donor polynucleotide and Cas enzyme: morphogenic factor; or further combinations thereof) described herein can range in a ratio of about 1:1; 2:1; 4:1; 9:1; 10:1; 20:1; 50:1; 100:1 to about 1:1, 1:2, 1:5 and to about 1:10. These ratio can be adapted to a variety of factors that influence the amount of DNA delivered into a cell. These include for example, copy numbers of plasmids, Agrobacterium concentration, viral DNA amount if viral infection is the mode of delivery, origin of replication differences, Rhizobiales strain differences, concentration of DNA on particles for particle bombardment, and any other form of delivery where the amount or concentration of the components delivered can be controlled, measured or otherwise modulated.

[0030] Disclosed herein are improved Agrobacterium-mediated genome editing solutions for target cell genomes, wherein helper genes (such as morphogenic factors, e.g., Wuschel) and the Cas endonuclease are provided by separate Agrobacteria and T-DNAs, to provide such components without their integration into the target cell's genome. Other Rhizobiales-mediated transformation, such as the use of Ochrobacterium, is further contemplated.

[0031] In a transformation with two different Agrobacteria, at some frequency there will be infection of both into a single cell. While first 1st donor T-strand does integrate stably, the second is able to transiently express genes, but not integrate into the genome to produce a viable plant. This method filters out/selects against any events where the second helper T-strand stably integrates. This method is useful for any plant, for example any crop plant, or in plants where segregating unwanted loci out of the germplasm is difficult (e.g., sugarcane, tree crops, clonally propagated crops, crops with perfect flowers, etc.) This novel method eliminates the need for segregation of unwanted DNA, leaving only the modified locus. In some aspects, the method relies on allowing transformation using a mixture of two Rhizobiales strains (comprising two different T-DNA sequences) to drive homologous recombination editing or base-pair editing with no integration of any accessory component, such as a morphogenic factor or the Cas endonuclease genes. By adjusting the ratio of the two Rhizobiales strains, targeted genomic modifications can be recovered with no random integration of any accessory component. In some aspects, the ratio of the two Rhizobiales (WUS and/or Cas9 Agro to HDR template Agro) is 9:1, 1:1, 1:9, 1:99. In some aspects, the Rhizobiales strain is Agrobacterium tumefaciens.

[0032] In certain embodiments, the T-DNA delivery can be influenced by mixing Agrobacteria (or for example different strains of Rhizobiales) at various ratios where the two Agrobacteria contain a plasmid with the same origin of replication but with two different T-DNAs (e.g., T-DNA 1 and T-DNA2). This ratio can extend from 1:1 up to 1:100 where either Agrobacterium can be present at the higher ratio.

[0033] In certain embodiments, T-DNA delivery can also be influenced by using two T-DNA containing plasmids in the same Agrobacterium cell, where different origins of replication impact the relative copy numbers of the plasmids within the same Agro. Different origins of replication have been demonstrated to result in low to high copy number (e.g., Zhi et al. 2015, Plant cell Reports 34, 745-754). For example, within the AGL0 strain, a vector containing a RK2 ORI had a relative copy number of 1 plasmid copy per cell. Whereas, a low copy number repABC-containing vector had a relative copy number of 0.22 plasmid copies per cell. Likewise, a AGL0 containing a high copy ORI pVS1 had a relative copy number of 2.65 plasmid copies per cell.

[0034] T-DNA delivery can also be influenced by using two agrobacteria, each containing its own T-DNA plasmid, where one agrobacterium contains a low copy number origin of replication and the other contains a high copy number origin of replication.

[0035] T-DNA delivery can also be influenced where one plasmid has reduced TDNA delivery due to a RB sequence which does not match the corresponding VIRD2 strain of origin. The second plasmid has a T-DNA where the RB sequence and VIRD2 come from the same strain of origin, and thus will have higher T-DNA delivery.

[0036] Double-strand breaks induced by double-strand-break-inducing agents, such as endonucleases that cleave the phosphodiester bond within a polynucleotide chain, can result in the induction of DNA repair mechanisms, including the non-homologous end-joining pathway, and homologous recombination. Endonucleases include a range of different enzymes, including restriction endonucleases (see e.g., Roberts et al., (2003) Nucleic Acids Res 1:418-20), Roberts et al., (2003) Nucleic Acids Res 31:1805-12, and Belfort et al., (2002) in Mobile DNA II, pp. 761-783, Eds. Craigie et al., (ASM Press, Washington, DC)), meganucleases (see e.g., WO 2009/114321; Gao et al. (2010) Plant Journal 1:176-187), TAL effector nucleases or TALENs (see e.g., US20110145940, Christian, M., T. Cermak, et al. 2010. Targeting DNA double-strand breaks with TAL effector nucleases. Genetics 186(2): 757-61 and Boch et al., (2009), Science 326(5959): 1509-12), Zinc Finger Nucleases (see e.g., Kim, Y. G., J. Cha, et al. (1996). “Hybrid restriction enzymes: zinc finger fusions to FokI cleavage”), and CRISPR-Cas endonucleases (see e.g., WO2007/025097 application published Mar. 1, 2007).

[0037] Once a double-strand break is induced in the genome, cellular DNA repair mechanisms are activated to repair the break. There are two DNA repair pathways. One is termed nonhomologous end-joining (NHEJ) pathway (Bleuyard et al., (2006) DNA Repair 5:1-12) and the other is homology-directed repair (HDR). The structural integrity of chromosomes is typically preserved by NHEJ, but deletions, insertions, or other rearrangements (such as chromosomal translocations) are possible (Siebert and Puchta, 2002, Plant Cell 14:1121-31; Pacher et al., 2007, Genetics 175:21-9. The HDR pathway is another cellular mechanism to repair double-stranded DNA breaks, and includes homologous recombination (HR) and single-strand annealing (SSA) (Lieber. 2010 Annu. Rev. Biochem. 79:181-211).

[0038] Terms used in the claims and specification are defined as set forth below unless otherwise specified. It must be noted that, as used in the specification and the appended claims, the singular forms “a,” “an” and “the” include plural referents unless the context clearly dictates otherwise.

[0039] “Genome” as it applies to a prokaryotic and eukaryotic cell or organism cells encompasses not only chromosomal DNA found within the nucleus, but organelle DNA found within subcellular components (e.g., mitochondria, or plastid) of the cell.

[0040] “Target site”, “target sequence”, “target site sequence, “target DNA”, “target locus”, “genomic target site”, “genomic target sequence”, “genomic target locus” and “protospacer”, are used interchangeably herein and refer to a polynucleotide sequence such as, but not limited to, a nucleotide sequence on a chromosome, episome, a locus, or any other DNA molecule in the genome (including chromosomal, chloroplastic, mitochondrial DNA, plasmid DNA) of a cell, at which a guide polynucleotide/Cas endonuclease complex can recognize, bind to, and optionally nick or cleave. The target site can be an endogenous site in the genome of a cell, or alternatively, the target site can be heterologous to the cell and thereby not be naturally occurring in the genome of the cell, or the target site can be found in a heterologous genomic location compared to where it occurs in nature. terms “endogenous target sequence” and “native target sequence” are used interchangeable herein to refer to a target sequence that is endogenous or native to the genome of a cell and is at the endogenous or native position of that target sequence in the genome of the cell. “artificial target site” or “artificial target sequence” are used interchangeably herein and refer to a target sequence that has been introduced into the genome of a cell. Such an artificial target sequence can be identical in sequence to an endogenous or native target sequence in the genome of a cell but be located in a different position (i.e., a non-endogenous or non-native position) in the genome of a cell.

[0041] “Polynucleotide” is not intended to limit the present disclosure to polynucleotides comprising DNA or RNA. Such deoxyribonucleotides and ribonucleotides include both naturally occurring molecules and synthetic analogues. The polynucleotides disclosed herein also encompass all forms of sequences including, but not limited to, single-stranded forms, double-stranded forms, hairpins, stem-and-loop structures, and the like.

[0042] “Isolated” nucleic acid molecule (or DNA) is used herein to refer to a nucleic acid sequence (or DNA) that is no longer in its natural environment, for example in an in vitro or in a heterologous recombinant bacterial or plant host cell. An isolated nucleic acid molecule, or biologically active portion thereof, is substantially free of other cellular material or culture medium when produced by recombinant techniques, or substantially free of chemical precursors or other chemicals when chemically synthesized. An isolated nucleic acid is free of sequences (optimally protein encoding sequences) that naturally flank the nucleic acid (i.e., sequences located at the 5′ and 3′ ends of the nucleic acid) in the genomic DNA of the organism from which the nucleic acid is derived.

[0043] “Variants” is intended to mean substantially similar sequences. For polynucleotides, a variant comprises a polynucleotide having a deletion (i.e., truncations) at the 5′ and/or 3′ end and/or a deletion and/or addition of one or more nucleotides at one or more internal sites within the native polynucleotide and/or a substitution of one or more nucleotides at one or more sites in the native polynucleotide.

[0044] “Functional variant”, “variant that is functionally equivalent” and “functionally equivalent variant” of a protein, including any described herein, are used interchangeably herein, and refer to a variant of the protein in which the protein's native ability is retained either partially or completely. In some aspects, the function may be entirely new.

[0045] “Fragment” is intended a portion of the polynucleotide or a portion of the amino acid sequence and hence protein encoded thereby. Fragments of a polynucleotide may encode protein fragments that retain the biological activity of the native protein and hence influence male fertility. Alternatively, fragments of a polynucleotide that are useful as hybridization probes generally do not encode fragment proteins retaining biological activity. Thus, fragments of a nucleotide sequence may range from at least about 20 nucleotides, about 50 nucleotides, about 100 nucleotides, and up to the full-length polynucleotide encoding the polypeptides disclosed herein.

[0046] “Functional fragment,” “fragment that is functionally equivalent,” and “functionally equivalent fragment” are used interchangeably herein. These terms refer to a portion or subsequence of a polypeptide sequence of the present disclosure in which its native ability is retained.

[0047] “Heterologous” in reference to a sequence is a sequence that originates from a foreign species or, if from the same species, is substantially modified from its native form in composition and/or genomic locus by deliberate human intervention. For example, a promoter operably linked to a heterologous polynucleotide is from a species different from the species from which the polynucleotide was derived, or, if from the same/analogous species, one or both are substantially modified from their original form and/or genomic locus, or the promoter is not the native promoter for the operably linked polynucleotide.

[0048] “Percent (%) sequence identity” with respect to a reference sequence (subject) is determined as the percentage of amino acid residues or nucleotides in a candidate sequence (query) that are identical with the respective amino acid residues or nucleotides in the reference sequence, after aligning the sequences and introducing gaps, if necessary, to achieve the maximum percent sequence identity, and not considering any amino acid conservative substitutions as part of the sequence identity. Alignment for purposes of determining percent sequence identity can be achieved in various ways that are within the skill in the art, for instance, using publicly available computer software such as BLAST, BLAST-2. Those skilled in the art can determine appropriate parameters for aligning sequences, including any algorithms needed to achieve maximal alignment over the full length of the sequences being compared. The percent identity between the two sequences is a function of the number of identical positions shared by the sequences (e.g., percent identity of query sequence=number of identical positions between query and subject sequences/total number of positions of query sequence×100).

[0049] “Introducing” is intended to mean presenting to the host cell, plant, plant cell or plant part the polynucleotide or polypeptide in such a manner that the sequence gains access to the interior of a cell of the plant or organism.

[0050] “Crossed” or “cross” refers to a sexual cross and involved the fusion of two haploid gametes via pollination to produce diploid progeny (e.g., cells, seeds or plants). encompasses both the pollination of one plant by another and selfing (or self-pollination, e.g., when the pollen and ovule are from the same plant).

[0051] “Closely linked”, in the present application, means that recombination between two linked loci occurs with a frequency of equal to or less than about 10% (i.e., are separated on a genetic map by not more than 10 cM). Put another way, the closely linked loci co-segregate at least 90% of the time. Marker loci are especially useful with respect to the subject matter of the current disclosure when they demonstrate a significant probability of co-segregation (linkage) with a desired trait (e.g., resistance to southern corn rust). Closely linked loci such as a marker locus and a second locus can display an inter-locus recombination frequency of 10% or less, preferably about 9% or less, still more preferably about 8% or less, yet more preferably about 7% or less, still more preferably about 6% or less, yet more preferably about 5% or less, still more preferably about 4% or less, yet more preferably about 3% or less, and still more preferably about 2% or less. In highly preferred embodiments, the relevant loci display a recombination a frequency of about 1% or less, e.g., about 0.75% or less, more preferably about 0.5% or less, or yet more preferably about 0.25% or less. Two loci that are localized to the same chromosome, and at such a distance that recombination between the two loci occurs at a frequency of less than 10% (e.g., about 9%, 8%, 7%, 6%, 5%, 4%, 3%, 2%, 1%, 0.75%, 0.5%, 0.25%, or less) are also said to be “proximal to” each other. In some cases, two different markers can have the same genetic map coordinates. In that case, the two markers are in such close proximity to each other that recombination occurs between them with such low frequency that it is undetectable.

[0052] “Line” or “strain” is a group of individuals of identical parentage that are generally inbred to some degree and that are generally homozygous and homogeneous at most loci (isogenic or near isogenic). “subline” refers to an inbred subset of descendents that are genetically distinct from other similarly inbred subsets descended from the same progenitor.

[0053] “Elite line” is any line that has resulted from breeding and selection for superior agronomic performance.

[0054] “Enhanced trait” as used in describing the aspects of the present disclosure includes improved or enhanced water use efficiency or drought tolerance, osmotic stress tolerance, high salinity stress tolerance, heat stress tolerance, enhanced cold tolerance, including cold germination tolerance, increased yield, enhanced nitrogen use efficiency, early plant growth and development, late plant growth and development, enhanced seed protein, and enhanced seed oil production

[0055] “Genetic markers” are nucleic acids that are polymorphic in a population and where the alleles of which can be detected and distinguished by one or more analytic methods, e.g., RFLP, AFLP, isozyme, SNP, SSR, and the like. also refers to nucleic acid sequences complementary to the genomic sequences, such as nucleic acids used as probes. Markers corresponding to genetic polymorphisms between members of a population can be detected by methods well-established in the art. These include, e.g., PCR-based sequence specific amplification methods, detection of restriction fragment length polymorphisms (RFLP), detection of isozyme markers, detection of polynucleotide polymorphisms by allele specific hybridization (ASH), detection of amplified variable sequences of the plant genome, detection of self-sustained sequence replication, detection of simple sequence repeats (SSRs), detection of single nucleotide polymorphisms (SNPs), or detection of amplified fragment length polymorphisms (AFLPs). Well established methods are also known for the detection of expressed sequence tags (ESTs) and SSR markers derived from EST sequences and randomly amplified polymorphic DNA (RAPD).

[0056] “Genomic region” is a segment of a chromosome in the genome of a cell that is present on either side of the target site or, alternatively, also comprises a portion of the target site. The genomic region can comprise at least 5-10, 5-15, 5-20, 5-25, 5-30, 5-35, 5-40, 5-45, 5-50, 5-55, 5-60, 5-65, 5-70, 5-75, 5-80, 5-85, 5-90, 5-95, 5-100, 5-200, 5-300, 5-400, 5-500, 5-600, 5-700, 5-800, 5-900, 5-1000, 5-1100, 5-1200, 5-1300, 5-1400, 5-1500, 5-1600, 5-1700, 5-1800, 5-1900, 5-2000, 5-2100, 5-2200, 5-2300, 5-2400, 5-2500, 5-2600, 5-2700, 5-2800. 5-2900, 5-3000, 5-3100 or more bases such that the genomic region has sufficient homology to undergo homologous recombination with the corresponding region of homology.

[0057] “Germplasm” refers to genetic material of or from an individual (e.g., a plant), a group of individuals (e.g., a plant line, variety or family), or a clone derived from a line, variety, species, or culture, or more generally, all individuals within a species or for several species (e.g., maize germplasm collection or Andean germplasm collection). The germplasm can be part of an organism or cell, or can be separate from the organism or cell. In general, germplasm provides genetic material with a specific molecular makeup that provides a physical foundation for some or all of the hereditary qualities of an organism or cell culture. germplasm includes cells, seed or tissues from which new plants may be grown, or plant parts, such as leafs, stems, pollen, or cells, that can be cultured into a whole plant.

[0058] “Grain” is intended the mature seed produced by commercial growers for purposes other than growing or reproducing the species. Progeny, variants, and mutants of the regenerated plants are also included within the scope of the disclosure, provided that these parts comprise the introduced nucleic acid sequences

[0059] “Haplotype” is the genotype of an individual at a plurality of genetic loci, i.e. a combination of alleles. Typically, the genetic loci described by a haplotype are physically and genetically linked, i.e., on the same chromosome segment.

[0060] “Heterogeneity” is used to indicate that individuals within the group differ in genotype at one or more specific loci.

[0061] “Heterosis”, or The heterotic response of material, can be defined by performance which exceeds the average of the parents (or high parent) when crossed to other dissimilar or unrelated groups.

[0062] “Heterotic group” comprises a set of genotypes that perform well when crossed with genotypes from a different heterotic group (Hallauer et al. (1998) Corn breeding, p. 463-564. In G. F. Sprague and J. W. Dudley (ed.) Corn and corn improvement). Inbred lines are classified into heterotic groups, and are further subdivided into families within a heterotic group, based on several criteria such as pedigree, molecular marker-based associations, and performance in hybrid combinations (Smith et al. (1990) Theor. Appl. Gen. 80:833-840). The two most widely used heterotic groups in the United States are referred to as “Iowa Stiff Stalk Synthetic” (also referred to herein as “stiff stalk”) and “Lancaster” or “Lancaster Sure Crop” (sometimes referred to as NSS, or non-Stiff Stalk).

[0063] “Hybrid” refers to the progeny obtained between the crossing of at least two genetically dissimilar parents.

[0064] “Inbred” refers to a line that has been bred for genetic homogeneity.

[0065] “Introgression” refers to the transmission of a desired allele of a genetic locus from one genetic background to another. For example, introgression of a desired allele at a specified locus can be transmitted to at least one progeny plant via a sexual cross between two parent plants, where at least one of the parent plants has the desired allele within its genome. Alternatively, for example, transmission of an allele can occur by recombination between two donor genomes, e.g., in a fused protoplast, where at least one of the donor protoplasts has the desired allele in its genome. The desired allele can be, e.g., a transgene, a modified (mutated or edited) native allele, or a selected allele of a marker or QTL.

[0066] “Linkage disequilibrium” is most commonly assessed using the measure r2, which is calculated using the formula described by Hill, W. G. and Robertson, A, Theor. Appl. Genet. 38:226-231(1968). When r2=1, complete LD exists between the two marker loci, meaning that the markers have not been separated by recombination and have the same allele frequency. The r2 value will be dependent on the population used. Values for r2 above ⅓ indicate sufficiently strong LD to be useful for mapping (Ardlie et al., Nature Reviews Genetics 3:299-309 (2002)). Hence, alleles are in linkage disequilibrium when r2 values between pairwise marker loci are greater than or equal to 0.33, 0.4, 0.5, 0.6, 0.7, 0.8, 0.9, or 1.0. Linkage disequilibrium refers to a non-random segregation of genetic loci or traits (or both). In either case, linkage disequilibrium implies that the relevant loci are within sufficient physical proximity along a length of a chromosome so that they segregate together with greater than random (i.e., non-random) frequency. Markers that show linkage disequilibrium are considered linked. Linked loci co-segregate more than 50% of the time, e.g., from about 51% to about 100% of the time. In other words, two markers that co-segregate have a recombination frequency of less than 50% (and by definition, are separated by less than 50 cM on the same linkage group.) linkage can be between two markers, or alternatively between a marker and a locus affecting a phenotype. A marker locus can be “associated with” (linked to) a trait. The degree of linkage of a marker locus and a locus affecting a phenotypic trait is measured, e.g., as a statistical probability of co-segregation of that molecular marker with the phenotype (e.g., an F statistic or LOD score).

[0067] “Linkage” is used to describe the degree with which one marker locus is associated with another marker locus or some other locus. The linkage relationship between a molecular marker and a locus affecting a phenotype is given as “probability” or “adjusted probability”. Linkage can be expressed as a desired limit or range. For example, in some embodiments, any marker is linked (genetically and physically) to any other marker when the markers are separated by less than 50, 40, 30, 25, 20, or 15 map units (or cM) of a single meiosis map (a genetic map based on a population that has undergone one round of meiosis, such as e.g. an F2; the IBM2 maps consist of multiple meiosis). In some aspects, it is advantageous to define a bracketed range of linkage, for example, between 10 and 20 cM, between 10 and 30 cM, or between 10 and 40 cM. The more closely a marker is linked to a second locus, the better an indicator for the second locus that marker becomes. Thus, “closely linked loci” such as a marker locus and a second locus display an inter-locus recombination frequency of 10% or less, preferably about 9% or less, still more preferably about 8% or less, yet more preferably about 7% or less, still more preferably about 6% or less, yet more preferably about 5% or less, still more preferably about 4% or less, yet more preferably about 3% or less, and still more preferably about 2% or less. In highly preferred embodiments, the relevant loci display a recombination frequency of about 1% or less, e.g., about 0.75% or less, more preferably about 0.5% or less, or yet more preferably about 0.25% or less. Two loci that are localized to the same chromosome, and at such a distance that recombination between the two loci occurs at a frequency of less than 10% (e.g., about 9%, 8%, 7%, 6%, 5%, 4%, 3%, 2%, 1%, 0.75%, 0.5%, 0.25%, or less) are also said to be “in proximity to” each other. Since one cM is the distance between two markers that show a 1% recombination frequency, any marker is closely linked (genetically and physically) to any other marker that is in close proximity, e.g., at or less than 10 cM distant. Two closely linked markers on the same chromosome can be positioned 9, 8, 7, 6, 5, 4, 3, 2, 1, 0.75, 0.5 or 0.25 cM or less from each other.

[0068] “Plant” generically includes whole plants, plant organs, plant tissues, seeds, plant cells, seeds and progeny of the same. The plant is a monocot or dicot. Plant cells include, without limitation, cells from seeds, suspension cultures, embryos, meristematic regions, callus tissue, leaves, roots, shoots, gametophytes, sporophytes, pollen and microspores. A “plant element” is intended to reference either a whole plant or a plant component, which may comprise differentiated and/or undifferentiated tissues, for example but not limited to plant tissues, parts, and cell types. In one embodiment, a plant element is one of the following: whole plant, seedling, meristematic tissue, ground tissue, vascular tissue, dermal tissue, seed, leaf, root, shoot, stem, flower, fruit, stolon, bulb, tuber, corm, keiki, shoot, bud, tumor tissue, and various forms of cells and culture (e.g., single cells, protoplasts, embryos, callus tissue). It should be noted that a protoplast is not technically “intact” plant cell (as naturally found with all components), as protoplasts lack a cell wall. plant organ” refers to plant tissue or a group of tissues that constitute a morphologically and functionally distinct part of a plant. A plant element is synonymous with a portion of a plant, and refers to any part of the plant, and can include distinct tissues and/or organs, and may be used interchangeably with tissue” throughout. Similarly, a plant reproductive element” is intended to generically reference any part of a plant that is able to initiate other plants via either sexual or asexual reproduction of that plant, for example but not limited to: seed, seedling, root, shoot, cutting, scion, graft, rhizome, stolon, bulb, tuber, corm, keiki, or bud. The plant element may be in plant or in a plant organ, tissue culture, or cell culture.

[0069] “Plant part” refers to plant cells, plant protoplasts, plant cell tissue cultures from which plants can be regenerated, plant calli, plant clumps, and plant cells that are intact in plants or parts of plants such as embryos, pollen, ovules, egg cells, seeds, leaves, flowers, branches, fruit, kernels, ears, cobs, husks, stalks, roots, root tips, anthers, and the like, as well as the parts themselves. Grain is intended to mean the mature seed produced by commercial growers for purposes other than growing or reproducing the species. Progeny, variants, and mutants of the regenerated plants are also included within the scope of the invention, provided that these parts comprise the introduced polynucleotides.

[0070] “Plant-optimized nucleotide sequence” is a nucleotide sequence that has been optimized for expression in plants, particularly for increased expression in plants. A plant-optimized nucleotide sequence includes a codon-optimized gene. A plant-optimized nucleotide sequence can be synthesized by modifying a nucleotide sequence encoding a protein such as, for example, a Cas endonuclease as disclosed herein, using one or more plant-preferred codons for improved expression. See, for example, Campbell and Gowri (1990) Plant Physiol. 92:1-11 for a discussion of host-preferred codon usage.

[0071] “Progeny” comprises any subsequent generation of a plant.

[0072] “Target” site or plant or cell means one that is the recipient of an intended introduction of a molecule, or one in which a polynucleotide modification has been affected.

[0073] “Stable transformation” is a transformation in which the polynucleotide construct introduced into a plant integrates into the genome of the plant and is capable of being inherited by the progeny thereof.

[0074] “Transient transformation” means that a polynucleotide is introduced into the plant and does not integrate into the genome of the plant

[0075] The meaning of abbreviations is as follows: “sec” means second(s), “min” means minute(s), “h” means hour(s), “d” means day(s), “uL” means microliter(s), “mL” means milliliter(s), “L” means liter(s), “uM” means micromolar, “mM” means millimolar, “M” means molar, “mmol” means millimole(s), “umole” or “umole” mean micromole(s), “g” means gram(s), “ug” or “ug” means microgram(s), “ng” means nanogram(s), “U” means unit(s), “bp” means base pair(s) and “kb” means kilobase(s).

### Cas Endonucleases

[0076] Endonucleases are enzymes that cleave the phosphodiester bond within a polynucleotide chain, and include restriction endonucleases that cleave DNA at specific sites without damaging the bases. Examples of endonucleases include restriction endonucleases, meganucleases, TAL effector nucleases (TALENs), zinc finger nucleases, and Cas (CRISPR-associated) effector endonucleases.

[0077] As used herein, the term “Cas gene” refers to a gene that is generally coupled, associated or close to or in the vicinity of flanking CRISPR loci.

[0078] “CRISPR” (Clustered Regularly Interspaced Short Palindromic Repeats) loci refers to certain genetic loci encoding components of DNA cleavage systems, for example, used by bacterial and archaeal cells to destroy foreign DNA (Horvath and Barrangou, 2010, Science 327:167-170; WO2007025097, published 1 Mar. 2007). A CRISPR locus can consist of a CRISPR array, comprising short direct repeats (CRISPR repeats) separated by short variable DNA sequences (called spacers), which can be flanked by diverse Cas (CRISPR-associated) genes.

[0079] Cas endonucleases, either as single effector proteins or in an effector complex with other components, unwind the DNA duplex at the target sequence and optionally cleave at least one DNA strand, as mediated by recognition of the target sequence by a polynucleotide (such as, but not limited to, a crRNA or guide RNA) that is in complex with the Cas effector protein. Such recognition and cutting of a target sequence by a Cas endonuclease typically occurs if the correct protospacer-adjacent motif (PAM) is located at or adjacent to the 3′ end of the DNA target sequence. Alternatively, a Cas endonuclease herein may lack DNA cleavage or nicking activity, but can still specifically bind to a DNA target sequence when complexed with a suitable RNA component. (See also U.S. Patent Application US20150082478 published 19 Mar. 2015 and US20150059010 published 26 Feb. 2015). Cas endonucleases may occur as individual effectors (Class 2 CRISPR systems) or as part of larger effector complexes (Class I CRISPR systems).

[0080] The Cas endonuclease is guided by a single CRISPR RNA (crRNA) through direct RNA-DNA base-pairing to recognize a DNA target site that is in close vicinity to a protospacer adjacent motif (PAM) (Jore, M. M. et al., 2011, Nat. Struct. Mol. Biol. 18:529-536, Westra, E. R. et al., 2012, Molecular Cell 46:595-605, and Sinkunas, T. et al., 2013, EMBO J. 32:385-394).

[0081] The guide polynucleotide enables target recognition, binding, and optionally cleavage by the Cas endonuclease, and can be a single molecule or a double molecule. The guide polynucleotide sequence can be a RNA sequence, a DNA sequence, or a combination thereof (a RNA-DNA combination sequence). Optionally, the guide polynucleotide can comprise at least one nucleotide, phosphodiester bond or linkage modification such as, but not limited, to Locked Nucleic Acid (LNA), 5-methyl dC, 2,6-Diaminopurine, 2′-Fluoro A, 2′-Fluoro U, 2′-O-Methyl RNA, phosphorothioate bond, linkage to a cholesterol molecule, linkage to a polyethylene glycol molecule, linkage to a spacer 18 (hexaethylene glycol chain) molecule, or 5′ to 3′ covalent linkage resulting in circularization. A guide polynucleotide that solely comprises ribonucleic acids is also referred to as a “guide RNA” or “gRNA” (US20150082478 published 19 Mar. 2015 and US20150059010 published 26 Feb. 2015). A guide polynucleotide may be engineered or synthetic.

[0082] The guide polynucleotide includes a chimeric non-naturally occurring guide RNA comprising regions that are not found together in nature (i.e., they are heterologous with each other). For example, a chimeric non-naturally occurring guide RNA comprising a first nucleotide sequence domain (referred to as Variable Targeting domain or VT domain) that can hybridize to a nucleotide sequence in a target DNA, linked to a second nucleotide sequence that can recognize the Cas endonuclease, such that the first and second nucleotide sequence are not found linked together in nature.

[0083] The guide polynucleotide can be a double molecule (also referred to as duplex guide polynucleotide) comprising a crNucleotide sequence (such as a crRNA) and a tracrNucleotide (such as a tracrRNA) sequence. The guide polynucleotide can also be a single molecule (also referred to as single guide polynucleotide) comprising a crNucleotide sequence linked to a tracrNucleotide sequence. The single guide polynucleotide comprises a first nucleotide sequence domain (referred to as Variable Targeting domain or VT domain) that can hybridize to a nucleotide sequence in a target DNA and a Cas endonuclease recognition domain (CER domain), that interacts with a Cas endonuclease polypeptide.

[0084] The process for editing a genomic sequence at a Cas-gRNA double-strand-break site with a modification template generally comprises: providing a host cell with a Cas-gRNA system, either as individual components or as a complex, that recognizes a target sequence in the genome of the host cell and is able to induce a double-strand-break in the genomic sequence. The Cas endonuclease recognizes a “PAM” (Protospacer Adjacent Motif) on the target strand, and cleaves at or near the target site. Genome editing using double-strand-break-inducing agents, such as Cas9-gRNA complexes, has been described, for example in US20150082478 published on 19 Mar. 2015, WO2015026886 published on 26 Feb. 2015, WO2016007347 published 14 Jan. 2016, and WO2016025131 published on 18 Feb. 2016.

[0085] A guide polynucleotide/Cas endonuclease complex that can cleave both strands of a DNA target sequence typically comprises a Cas protein that has all of its endonuclease domains in a functional state (e.g., wild type endonuclease domains or variants thereof retaining some or all activity in each endonuclease domain). Thus, a wild type Cas protein (e.g., a Cas protein disclosed herein), or a variant thereof retaining some or all activity in each endonuclease domain of the Cas protein, is a suitable example of a Cas endonuclease that can cleave both strands of a DNA target sequence.

[0086] A guide polynucleotide/Cas endonuclease complex that can cleave one strand of a DNA target sequence can be characterized herein as having nickase activity (e.g., partial cleaving capability). A Cas nickase typically comprises one functional endonuclease domain that allows the Cas to cleave only one strand (i.e., make a nick) of a DNA target sequence. For example, a Cas9 nickase may comprise (i) a mutant, dysfunctional RuvC domain and (ii) a functional HNH domain (e.g., wild type HNH domain). As another example, a Cas9 nickase may comprise (i) a functional RuvC domain (e.g., wild type RuvC domain) and (ii) a mutant, dysfunctional HNH domain. Non-limiting examples of Cas9 nickases suitable for use herein are disclosed in US20140189896 published on 3 Jul. 2014. A pair of Cas nickases can be used to increase the specificity of DNA targeting. In general, this can be done by providing two Cas nickases that, by virtue of being associated with RNA components with different guide sequences, target and nick nearby DNA sequences on opposite strands in the region for desired targeting. Such nearby cleavage of each DNA strand creates a double-strand break (i.e., a DSB with single-stranded overhangs), which is then recognized as a substrate for non-homologous-end-joining, NHEJ (prone to imperfect repair leading to mutations) or homologous recombination, HR.

[0087] To facilitate optimal expression and nuclear localization for eukaryotic cells, the gene comprising the Cas endonuclease may be optimized as described in WO2016186953 published 24 Nov. 2016, and then delivered into cells as DNA expression cassettes by methods known in the art. In some aspects, the Cas endonuclease is provided as a polypeptide. In some aspects, the Cas endonuclease is provided as a polynucleotide encoding a polypeptide. In some aspects, the guide RNA is provided as a DNA molecule encoding one or more RNA molecules. In some aspects, the guide RNA is provide as RNA or chemically-modified RNA. In some aspects, the Cas endonuclease protein and guide RNA are provided as a ribonucleoprotein complex (RNP).

[0088] A Cas endonuclease, effector protein, or functional fragment thereof, for use in the disclosed methods, can be isolated from a native source, or from, a recombinant source where the genetically modified host cell is modified to express the nucleic acid sequence encoding the protein. Alternatively, the Cas protein can be produced using cell free protein expression systems, or be synthetically produced. Effector Cas nucleases may be isolated and introduced into a heterologous cell, or may be modified from its native form to exhibit a different type or magnitude of activity than what it would exhibit in its native source. Such modifications include but are not limited to: fragments, variants, substitutions, deletions, and insertions.

[0089] Fragments and variants of Cas endonucleases and Cas effector proteins can be obtained via methods such as site-directed mutagenesis and synthetic construction. Methods for measuring endonuclease activity are well known in the art such as, but not limiting to, WO2013166113 published 7 Nov. 2013, WO2016186953 published 24 Nov. 2016, and WO2016186946 published 24 Nov. 2016.

[0090] The Cas endonuclease can comprise a modified form of the Cas polypeptide. The modified form of the Cas polypeptide can include an amino acid change (e.g., deletion, insertion, or substitution) that reduces the naturally occurring nuclease activity of the Cas protein. For example, in some instances, the modified form of the Cas protein has less than 50%, less than 40%, less than 30%, less than 20%, less than 10%, less than 5%, or less than 1% of the nuclease activity of the corresponding wild-type Cas polypeptide (US20140068797 published 6 Mar. 2014). In some cases, the modified form of the Cas polypeptide has no substantial nuclease activity and is referred to as catalytically “inactivated Cas” or “deactivated Cas (dCas).” An inactivated Cas/deactivated Cas includes a deactivated Cas endonuclease (dCas). A catalytically inactive Cas effector protein can be fused to a heterologous sequence to induce or modify activity.

[0091] A Cas endonuclease can be part of a fusion protein comprising one or more heterologous protein domains (e.g., 1, 2, 3, or more domains in addition to the Cas protein). Such a fusion protein may comprise any additional protein sequence, and optionally a linker sequence between any two domains, such as between Cas and a first heterologous domain. Examples of protein domains that may be fused to a Cas protein herein include, without limitation, epitope tags (e.g., histidine [His], V5, FLAG, influenza hemagglutinin [HA], myc, VSV-G, thioredoxin [Trx]), reporters (e.g., glutathione-5-transferase [GST], horseradish peroxidase [RP], chloramphenicol acetyltransferase [CAT], beta-galactosidase, beta-glucuronidase [GUS], luciferase, green fluorescent protein [GFP], HcRed, DsRed, cyan fluorescent protein [CFP], yellow fluorescent protein [YFP], blue fluorescent protein [BFP]), and domains having one or more of the following activities: methylase activity, demethylase activity, transcription activation activity (e.g., VP16 or VP64), transcription repression activity, transcription release factor activity, histone modification activity, RNA cleavage activity and nucleic acid binding activity. A Cas protein can also be in fusion with a protein that binds DNA molecules or other molecules, such as maltose binding protein (MBP), S-tag, Lex A DNA binding domain (DBD), GAL4A DNA binding domain, and herpes simplex virus (HSV) VP16.

[0092] A catalytically active and/or inactive Cas endonuclease can be fused to a heterologous sequence (US20140068797 published 6 Mar. 2014). Suitable fusion partners include, but are not limited to, a polypeptide that provides an activity that indirectly increases transcription by acting directly on the target DNA or on a polypeptide (e.g., a histone or other DNA-binding protein) associated with the target DNA. Additional suitable fusion partners include, but are not limited to, a polypeptide that provides for methyltransferase activity, demethylase activity, acetyltransferase activity, deacetylase activity, kinase activity, phosphatase activity, ubiquitin ligase activity, deubiquitinating activity, adenylation activity, deadenylation activity, SUMOylating activity, deSUMOylating activity, ribosylation activity, deribosylation activity, myristoylation activity, or demyristoylation activity. Further suitable fusion partners include, but are not limited to, a polypeptide that directly provides for increased transcription of the target nucleic acid (e.g., a transcription activator or a fragment thereof, a protein or fragment thereof that recruits a transcription activator, a small molecule/drug-responsive transcription regulator, etc.). A partially active or catalytically inactive Cas endonuclease can also be fused to another protein or domain, for example Clo51 or FokI nuclease, to generate double-strand breaks (Guilinger et al. Nature Biotechnology, volume 32, number 6, June 2014).

### Morphogenic Factors

[0093] The present disclosure comprises methods and compositions for producing genomic modifications in an organism using a double-strand-break agent and a morphogenic factor. Morphogenic factors can enhance the rate, efficiency, and efficacy of targeted polynucleotide modification by a number of mechanisms, some of which are related to the capability of stimulating growth of a cell or tissue, including but not limited to: promoting progression through the cell cycle, inhibiting cell death, such as apoptosis, stimulating cell division, and/or stimulating embryogenesis. The polynucleotides can fall into several categories, including but not limited to, cell cycle stimulatory polynucleotides, developmental polynucleotides, anti-apoptosis polynucleotides, hormone polynucleotides, transcription factors, or silencing constructs targeted against cell cycle repressors or pro-apoptotic factors. Methods and compositions for rapid and efficient transformation of plants by transforming cells of plant explants with an expression construct comprising a heterologous nucleotide encoding a morphogenic factor are described in US Patent Application Publication No. US2017/0121722 (published 4 May 2017). A suitable plant explant includes for example, a mature seed, seed-derived mature embryos, apical meristems, axillary meristems, leaf tissue, leaf bases, stems, vascular cambium, the immature inflorescence, immature ears, immature tassels, immature embryos, immature cotyledons, mature or imbibed cotyledons, imbibed seed or seed-derived parts. The above explants can be derived from a diploid 2N plant or a haploid 1N plant or a plant part.

[0094] A morphogenic factor (gene or protein) may involved in plant metabolism, organ development, stem cell development, cell growth stimulation, organogenesis, somatic embryogenesis initiation, accelerated somatic embryo maturation, initiation and/or development of the apical meristem, initiation and/or development of shoot meristem, or a combination thereof.

[0095] In some aspects, the morphogenic factor is a molecule selected from one or more of the following categories: 1) cell cycle stimulatory polynucleotides including plant viral replicase genes such as RepA, cyclins, E2F, prolifera, cdc2 and cdc25; 2) developmental polynucleotides such as Lec1, Kn1 family, WUSCHEL, Zwille, BBM, Aintegumenta (ANT), FUS3, and members of the Knotted family, such as Kn1, STM, OSH1, and SbHl; 3) anti-apoptosis polynucleotides such as CED9, Bcl2, Bcl-X(L), Bcl-W, A1, McL-1, Mac1, Boo, and Bax-inhibitors; 4) hormone polynucleotides such as IPT, TZS, and CKI-1; and 5) silencing constructs targeted against cell cycle repressors, such as Rb, CK1, prohibitin, and weel, or stimulators of apoptosis such as APAF-1, bad, bax, CED-4, and caspase-3, and repressors of plant developmental transitions, such as Pickle and WD polycomb genes including FIE and Medea. The polynucleotides can be silenced by any known method such as antisense, RNA interference, cosuppression, chimerplasty, or transposon insertion.

[0096] In some aspects, the morphogenic gene is a member of the WUS/WOX gene family (WUS1, WUS2, WUS3, WOX2A, WOX4, WOX5, or WOX9) see U.S. Pat. Nos. 7,348,468 and 7,256,322 and United States Patent Application publications 20170121722 and 20070271628. Modulation of WUS/WOX is expected to modulate plant and/or plant tissue phenotype including plant metabolism, organ development, stem cell development, cell growth stimulation, organogenesis, somatic embryogenesis initiation, accelerated somatic embryo maturation, initiation and/or development of the apical meristem, initiation and/or development of shoot meristem, or a combination thereof. Expression of Arabidopsis WUS can induce stem cells in vegetative tissues, which can differentiate into somatic embryos (Zuo, et al. (2002) Plant J 30:349-359). Also of interest in this regard would be a MYB118 gene (see U.S. Pat. No. 7,148,402), MYB 115 gene (see Wang et al. (2008) Cell Research 224-235), a BABYBOOM gene (BBM; see Boutilier et al. (2002) Plant Cell 14:1737-1749), or a CLAVATA gene (see, for example, U.S. Pat. No. 7,179,963).

[0097] In some embodiments, the morphogenic gene or protein is a member of the AP2/ERF family of proteins. The AP2/ERF family of proteins is a plant-specific class of putative transcription factors that regulate a wide variety of developmental processes and are characterized by the presence of an AP2 DNA binding domain that is predicted to form an amphipathic alpha helix that binds DNA (PFAM Accession PF00847).

[0098] Members of the APETALA2 (AP2) family of proteins function in a variety of biological events, including but not limited to, development, plant regeneration, cell division, embryogenesis, and morphogenic (see, e.g., Riechmann and Meyerowitz (1998) Biol Chem 379:633-646; Saleh and Pages (2003) Genetika 35:37-50 and Database of Arabidopsis Transciption Factors at daft.cbi.pku.edu.cn). The AP2 family includes, but is not limited to, AP2, ANT, Glossy15, AtBBM, BnBBM, and maize ODP2/BBM-morphogenic genes.

[0099] Other morphogenic genes useful in the present disclosure include, but are not limited to, Ovule Development Protein 2 (ODP2) polypeptides, and related polypeptides, e.g., Babyboom (BBM) protein family proteins. In an aspect, the polypeptide comprising the two AP2-DNA binding domains is an ODP2, BBM2, BMN2, or BMN3 polypeptide. The ODP2 polypeptides of the disclosure contain two predicted APETALA2 (AP2) domains and are members of the AP2 protein family (PFAM Accession PF00847). The AP2 domain has now been found in a variety of proteins. The ODP2 polypeptides share homology with several polypeptides within the AP2 family, e.g., see FIG. 1 of U.S. Pat. No. 8,420,893, which is incorporated herein by reference in its entirety, provides an alignment of the maize and rice ODP2 polypeptides with eight other proteins having two AP2 domains.

[0100] In some embodiments, the morphogenic factor is a babyboom (BBM) polypeptide, which is a member of the AP2 family of transcription factors. The BBM protein from Arabidopsis (AtBBM) is preferentially expressed in the developing embryo and seeds and has been shown to play a central role in regulating embryo-specific pathways. Overexpression of AtBBM has been shown to induce spontaneous formation of somatic embryos and cotyledon-like structures on seedlings. See, Boutiler et al. (2002) The Plant Cell 14:1737-1749. The maize BBM protein also induces embryogenesis and promotes transformation (See, U.S. Pat. No. 7,579,529, which is herein incorporated by reference in its entirety). Thus, BBM polypeptides stimulate proliferation, induce embryogenesis, enhance the regenerative capacity of a plant, enhance transformation, and as demonstrated herein, enhance rates of targeted polynucleotide modification. As used herein “regeneration” refers to a morphogenic response that results in the production of new tissues, organs, embryos, whole plants or parts of whole plants that are derived from a single cell or a group of cells. Regeneration may proceed indirectly via a callus phase or directly, without an intervening callus phase. “Regenerative capacity” refers to the ability of a plant cell to undergo regeneration.

[0101] Other morphogenic genes useful in the present disclosure include, but are not limited to, LEC1 (Lotan et al., 1998, Cell 93:1195-1205), LEC2 (Stone et al., 2008, PNAS 105:3151-3156; Belide et al., 2013, Plant Cell Tiss. Organ Cult 113:543-553), KN1/STM (Sinha et al., 1993. Genes Dev 7:787-795), the IPT gene from Agrobacterium (Ebinuma and Komamine, 2001, In vitro Cell. Dev Biol—Plant 37:103-113), MONOPTEROS-DELTA (Ckurshumova et al., 2014, New Phytol. 204:556-566), the Agrobacterium AV-6b gene (Wabiko and Minemura 1996, Plant Physiol. 112:939-951), the combination of the Agrobacterium IAA-h and IAA-m genes (Endo et al., 2002, Plant Cell Rep., 20:923-928), the Arabidopsis SERK gene (Hecht et al., 2001, Plant Physiol. 127:803-816), the Arabiopsis AGL15 gene (Harding et al., 2003, Plant Physiol. 133:653-663), and the FUSCA gene (Castle and Meinke, Plant Cell 6:25-41), and the PICKLE gene (Ogas et al., 1999, PNAS 96:13839-13844).

[0102] The morphogenic factor can be derived from a monocot. In various aspects, the morphogenic factor is derived from barley, maize, millet, oats, rice, rye, Setaria sp., sorghum, sugarcane, switchgrass, triticale, turfgrass, or wheat.

[0103] The morphogenic factor can be derived from a dicot. The morphogenic factor can be derived from kale, cauliflower, broccoli, mustard plant, cabbage, pea, clover, alfalfa, broad bean, tomato, cassava, soybean, canola, alfalfa, sunflower, safflower, tobacco, Arabidopsis, poplar, apple, Amaranthus, or cotton. The morphogenic factor can also be derived from a gymnosperm, more specifically from a species within the Cycadophyta (with examples such as Encephalartos spp, Cycas, spp, Bownenia spp, and Macrozamia spp.), Ginkgophyta (with examples such as Ginko biloba), Gnetophyta (with examples such as Gnetum gnomen, Ephedra spp. and Welwitschia spp), and Pinophyta (with examples such as Pinus spp, Abies spp, Agathis spp, Tsuga spp, Pseudotsuga menziesii, Chamaecyparis spp, Juniperus spp, Taxodium spp, Cupressus spp, Metasequoia, and Sequoia).

[0104] The present disclosure encompasses isolated or substantially purified polynucleotide or polypeptide morphogenic factor compositions.

[0105] The morphogenic factor may be altered in various ways including amino acid substitutions, deletions, truncations, and insertions. Methods for such manipulations are generally known. For example, amino acid sequence variants of the morphogenic proteins can be prepared by mutations in the DNA. Methods for mutagenesis and nucleotide sequence alterations are well known in the art. Guidance as to appropriate amino acid substitutions that do not affect biological activity of the protein of interest may be found in the model of Dayhoff et al. (1978) Atlas of Protein Sequence and Structure (Natl. Biomed. Res. Found., Washington, D.C.), herein incorporated by reference. Conservative substitutions, such as exchanging one amino acid with another having similar properties, may be optimal.

[0106] In some aspects, the morphogenic gene is selected from the group consisting of: SEQ ID NOs:1-5, 11-16, 22, and 23-47. In some aspects, the morphogenic protein is selected from the group consisting of: SEQ ID NOs: 6-10, 17-21, and 48-73.

[0107] In some aspects, a plurality of morphogenic factors is selected. When multiple morphogenic factors are used, the polynucleotides encoding each of the factors can be present on the same expression cassette or on separate expression cassettes. Likewise, the polynucleotide(s) encoding the morphogenic factor(s) and the polynucleotide encoding the double-strand break-inducing agent can be located on the same or different expression cassettes. When two or more factors are coded for by separate expression cassettes, the expression cassettes can be provided to the organism simultaneously or sequentially.

[0108] In some aspects, the expression of the morphogenic factor is transient. In some aspects, the expression of the morphogenic factor is constitutive. In some aspects, the expression of the morphogenic factor is specific to a particular tissue or cell type. In some aspects, the expression of the morphogenic factor is temporally regulated. In some aspects, the expression of the morphogenic factor is regulated by an environmental condition, such as temperature, time of day, or other factor. In some aspects, the expression of the morphogenic factor is stable. In some aspects, expression of the morphogenic factor is controlled. The controlled expression may be a pulsed expression of the morphogenic factor for a particular period of time. Alternatively, the morphogenic factor may be expressed in only some transformed cells and not expressed in others. The control of expression of the morphogenic factor can be achieved by a variety of methods as disclosed herein.

### Polynucleotides and Plant Traits of Interest

[0109] Polynucleotides of interest are further described herein and include polynucleotides reflective of the commercial markets and interests of those involved in the development of the crop. Crops and markets of interest change, and as developing nations open up world markets, new crops and technologies will emerge also. In addition, as our understanding of agronomic traits and characteristics such as yield and heterosis increase, the choice of genes for genetic engineering will change accordingly.

[0110] Agronomically important traits such as oil, starch, and protein content can be genetically altered in addition to using traditional breeding methods. Modifications include increasing content of oleic acid, saturated and unsaturated oils, increasing levels of lysine and sulfur, providing essential amino acids, and also modification of starch. Hordothionin protein modifications are described in U.S. Pat. Nos. 5,703,049, 5,885,801, 5,885,802, and 5,990,389.

[0111] Polynucleotide sequences of interest may encode proteins involved in providing disease or pest resistance. By “disease resistance” or “pest resistance” is intended that the plants avoid the harmful symptoms that are the outcome of the plant-pathogen interactions. Pest resistance genes may encode resistance to pests that have great yield drag such as rootworm, cutworm, European Corn Borer, and the like. Disease resistance and insect resistance genes such as lysozymes or cecropins for antibacterial protection, or proteins such as defensins, glucanases or chitinases for antifungal protection, or Bacillus thuringiensis endotoxins, protease inhibitors, collagenases, lectins, or glycosidases for controlling nematodes or insects are all examples of useful gene products. Genes encoding disease resistance traits include detoxification genes, such as against fumonisin (U.S. Pat. No. 5,792,931); avirulence (avr) and disease resistance (R) genes (Jones et al. (1994) Science 266:789; Martin et al. (1993) Science 262:1432; and Mindrinos et al. (1994) Cell 78:1089); and the like. Insect resistance genes may encode resistance to pests that have great yield drag such as rootworm, cutworm, European Corn Borer, and the like. Such genes include, for example, Bacillus thuringiensis toxic protein genes (U.S. Pat. Nos. 5,366,892; 5,747,450; 5,736,514; 5,723,756; 5,593,881; and Geiser et al. (1986) Gene 48:109); and the like.

[0112] An “herbicide resistance protein” or a protein resulting from expression of an “herbicide resistance-encoding nucleic acid molecule” includes proteins that confer upon a cell the ability to tolerate a higher concentration of an herbicide than cells that do not express the protein, or to tolerate a certain concentration of an herbicide for a longer period of time than cells that do not express the protein. Herbicide resistance traits may be introduced into plants by genes coding for resistance to herbicides that act to inhibit the action of acetolactate synthase (ALS, also referred to as acetohydroxyacid synthase, AHAS), in particular the sulfonylurea (UK: sulphonylurea) type herbicides, genes coding for resistance to herbicides that act to inhibit the action of glutamine synthase, such as phosphinothricin or basta (e.g., the bar gene), glyphosate (e.g., the EPSP synthase gene and the GAT gene), HPPD inhibitors (e.g, the HPPD gene) or other such genes known in the art. See, for example, U.S. Pat. Nos. 7,626,077; 5,310,667; 5,866,775; 6,225,114, 6,248,876; 7,169,970; 6,867,293, and 9,187,762. The bar gene encodes resistance to the herbicide basta, the nptII gene encodes resistance to the antibiotics kanamycin and geneticin, and the ALS-gene mutants encode resistance to the herbicide chlorsulfuron.

[0113] Furthermore, it is recognized that the polynucleotide of interest may also comprise antisense sequences complementary to at least a portion of the messenger RNA (mRNA) for a targeted gene sequence of interest. Antisense nucleotides are constructed to hybridize with the corresponding mRNA. Modifications of the antisense sequences may be made as long as the sequences hybridize to and interfere with expression of the corresponding mRNA. In this manner, antisense constructions having 70%, 80%, or 85% sequence identity to the corresponding antisense sequences may be used. Furthermore, portions of the antisense nucleotides may be used to disrupt the expression of the target gene. Generally, sequences of at least 50 nucleotides, 100 nucleotides, 200 nucleotides, or greater may be used.

[0114] In addition, the polynucleotide of interest may also be used in the sense orientation to suppress the expression of endogenous genes in plants. Methods for suppressing gene expression in plants using polynucleotides in the sense orientation are known in the art. The methods generally involve transforming plants with a DNA construct comprising a promoter that drives expression in a plant operably linked to at least a portion of a nucleotide sequence that corresponds to the transcript of the endogenous gene. Typically, such a nucleotide sequence has substantial sequence identity to the sequence of the transcript of the endogenous gene, generally greater than about 65% sequence identity, about 85% sequence identity, or greater than about 95% sequence identity. See U.S. Pat. Nos. 5,283,184 and 5,034,323.

[0115] The polynucleotide of interest can also be a phenotypic marker. A phenotypic marker is screenable or a selectable marker that includes visual markers and selectable markers whether it is a positive or negative selectable marker. Any phenotypic marker can be used. Specifically, a selectable or screenable marker comprises a DNA segment that allows one to identify, or select for or against a molecule or a cell that comprises it, often under particular conditions. These markers can encode an activity, such as, but not limited to, production of RNA, peptide, or protein, or can provide a binding site for RNA, peptides, proteins, inorganic and organic compounds or compositions and the like.

[0116] Examples of selectable markers include, but are not limited to, DNA segments that comprise restriction enzyme sites; DNA segments that encode products which provide resistance against otherwise toxic compounds including antibiotics, such as, spectinomycin, ampicillin, kanamycin, tetracycline, Basta, neomycin phosphotransferase II (NEO) and hygromycin phosphotransferase (HPT)); DNA segments that encode products which are otherwise lacking in the recipient cell (e.g., tRNA genes, auxotrophic markers); DNA segments that encode products which can be readily identified (e.g., phenotypic markers such as 0-galactosidase, GUS; fluorescent proteins (such as green fluorescent protein (GFP), cyan (CFP), yellow (YFP), red (RFP), and blue (BFP), (Shaner et al., 2005, Nature Methods 2:905-909)), and cell surface proteins); the generation of new primer sites for PCR (e.g., the juxtaposition of two DNA sequence not previously juxtaposed), the inclusion of DNA sequences not acted upon or acted upon by a restriction endonuclease or other DNA modifying agent, chemical, etc.; and, the inclusion of a DNA sequences required for a specific modification (e.g., methylation) that allows its identification.

[0117] Additional selectable markers include genes that confer resistance to herbicidal compounds, such as sulphonylureas, glufosinate ammonium, bromoxynil, imidazolinones, and 2,4-dichlorophenoxyacetate (2,4-D). See for example, Acetolactase synthase (ALS) for resistance to sulfonylureas, imidazolinones, triazolopyrimidine sulfonamides, pyrimidinylsalicylates and sulphonylaminocarbonyl-triazolinones (Shaner and Singh, 1997, Herbicide Activity: Toxicol Biochem Mol Biol 69-110); glyphosate resistant 5-enolpyruvylshikimate-3-phosphate (EPSPS) (Saroha et al. 1998, J. Plant Biochemistry & Biotechnology Vol 7:65-72).

### Recombinant Constructs for Transformation of Cells

[0118] The disclosed guide polynucleotides, Cas endonucleases, polynucleotide modification templates, donor DNAs, guide polynucleotide/Cas endonuclease systems disclosed herein, and any one combination thereof, optionally further comprising one or more polynucleotide(s) of interest, can be introduced into a cell. Cells include, but are not limited to, human, non-human, animal, bacterial, fungal, insect, yeast, non-conventional yeast, and plant cells as well as pollen, plants and seeds produced by the methods described herein.

[0119] Standard recombinant DNA and molecular cloning techniques used herein are well known in the art and are described more fully in Sambrook et al., Molecular Cloning: A Laboratory Manual; Cold Spring Harbor Laboratory: Cold Spring Harbor, NY (1989). Transformation methods are well known to those skilled in the art and are described infra.

[0120] Vectors and constructs include circular plasmids, and linear polynucleotides, comprising a polynucleotide of interest and optionally other components including linkers, adapters, regulatory or analysis. In some examples a recognition site and/or target site can be comprised within an intron, coding sequence, 5′ UTRs, 3′ UTRs, and/or regulatory regions.

[0121] Various methods and compositions can be employed to obtain a cell or organism having a polynucleotide of interest inserted in a target site for a Cas endonuclease. Such methods can employ homologous recombination (HR) to provide integration of the polynucleotide of interest at the target site. In one method described herein, a polynucleotide of interest is introduced into the organism cell via a donor DNA construct. The donor DNA construct further comprises a first and a second region of homology that flank the polynucleotide of interest. The first and second regions of homology of the donor DNA share homology to a first and a second genomic region, respectively, present in or flanking the target site of the cell or organism genome.

[0122] The donor DNA can be tethered to the guide polynucleotide. Tethered donor DNAs can allow for co-localizing target and donor DNA, useful in genome editing, gene insertion, and targeted genome regulation, and can also be useful in targeting post-mitotic cells where function of endogenous HR machinery is expected to be highly diminished (Mali et al., 2013, Nature Methods Vol. 10: 957-963).

[0123] The amount of homology or sequence identity shared by a target and a donor polynucleotide can vary and includes total lengths and/or regions having unit integral values in the ranges of about 1-20 bp, 20-50 bp, 50-100 bp, 75-150 bp, 100-250 bp, 150-300 bp, 200-400 bp, 250-500 bp, 300-600 bp, 350-750 bp, 400-800 bp, 450-900 bp, 500-1000 bp, 600-1250 bp, 700-1500 bp, 800-1750 bp, 900-2000 bp, 1-2.5 kb, 1.5-3 kb, 2-4 kb, 2.5-5 kb, 3-6 kb, 3.5-7 kb, 4-8 kb, 5-10 kb, or up to and including the total length of the target site. These ranges include every integer within the range, for example, the range of 1-20 bp includes 1, 2, 3, 4, 5, 6, 7, 8, 9, 10, 11, 12, 13, 14, 15, 16, 17, 18, 19 and 20 bps. The amount of homology can also be described by percent sequence identity over the full aligned length of the two polynucleotides which includes percent sequence identity of about at least 50%, 55%, 60%, 65%, 70%, 71%, 72%, 73%, 74%, 75%, 76%, 77%, 78%, 79%, 80%, 81%, 82%, 83%, 84%, 85%, 86%, 87%, 88%, 89%, 90%, 91%, 92%, 93%, 94%, 95%, 96%, 97%, 98%, between 98% and 99%, 99%, between 99% and 100%, or 100%. Sufficient homology includes any combination of polynucleotide length, global percent sequence identity, and optionally conserved regions of contiguous nucleotides or local percent sequence identity, for example sufficient homology can be described as a region of 75-150 bp having at least 80% sequence identity to a region of the target locus. Sufficient homology can also be described by the predicted ability of two polynucleotides to specifically hybridize under high stringency conditions, see, for example, Sambrook et al., (1989) Molecular Cloning: A Laboratory Manual, (Cold Spring Harbor Laboratory Press, NY); Current Protocols in Molecular Biology, Ausubel et al., Eds (1994) Current Protocols, (Greene Publishing Associates, Inc. and John Wiley & Sons, Inc.); and, Tijssen (1993) Laboratory Techniques in Biochemistry and Molecular Biology—Hybridization with Nucleic Acid Probes, (Elsevier, New York).

### Optimization of Sequences for Expression in Plants

[0124] Methods are available in the art for synthesizing plant-preferred genes. See, for example, U.S. Pat. Nos. 5,380,831, and 5,436,391, and Murray et al. (1989) Nucleic Acids Res. 17:477-498. Additional sequence modifications are known to enhance gene expression in a plant host. These include, for example, elimination of: one or more sequences encoding spurious polyadenylation signals, one or more exon-intron splice site signals, one or more transposon-like repeats, and other such well-characterized sequences that may be deleterious to gene expression. The G-C content of the sequence may be adjusted to levels average for a given plant host, as calculated by reference to known genes expressed in the host plant cell. When possible, the sequence is modified to avoid one or more predicted hairpin secondary mRNA structures. Thus, “a plant-optimized nucleotide sequence” of the present disclosure comprises one or more of such sequence modifications.

### Expression Elements

[0125] Any polynucleotide encoding a Cas protein or other CRISPR system component disclosed herein may be functionally linked to a heterologous expression element, to facilitate transcription or regulation in a host cell. Such expression elements include but are not limited to: promoter, leader, intron, and terminator. Expression elements may be “minimal”—meaning a shorter sequence derived from a native source, that still functions as an expression regulator or modifier. Alternatively, an expression element may be “optimized”—meaning that its polynucleotide sequence has been altered from its native state in order to function with a more desirable characteristic in a particular host cell. Alternatively, an expression element may be “synthetic”—meaning that it is designed in silico and synthesized for use in a host cell. Synthetic expression elements may be entirely synthetic, or partially synthetic (comprising a fragment of a naturally-occurring polynucleotide sequence).

[0126] It has been shown that certain promoters are able to direct RNA synthesis at a higher rate than others. These are called “strong promoters”. Certain other promoters have been shown to direct RNA synthesis at higher levels only in particular types of cells or tissues and are often referred to as “tissue specific promoters”, or “tissue-preferred promoters” if the promoters direct RNA synthesis preferably in certain tissues but also in other tissues at reduced levels.

[0127] A plant promoter includes a promoter capable of initiating transcription in a plant cell. For a review of plant promoters, see, Potenza et al., 2004, In vitro Cell Dev Biol 40:1-22; Porto et al., 2014, Molecular Biotechnology (2014), 56(1), 38-49.

[0128] Constitutive promoters include, for example, the core CaMV 35S promoter (Odell et al., (1985) Nature 313:810-2); rice actin (McElroy et al., (1990) Plant Cell 2:163-71); ubiquitin (Christensen et al., (1989) Plant Mol Biol 12:619-32; ALS promoter (U.S. Pat. No. 5,659,026) and the like.

[0129] Tissue-preferred promoters can be utilized to target enhanced expression within a particular plant tissue. Tissue-preferred promoters include, for example, WO2013103367 published 11 Jul. 2013, Kawamata et al., (1997) Plant Cell Physiol 38:792-803; Hansen et al., (1997) Mol Gen Genet 254:337-43; Russell et al., (1997) Transgenic Res 6:157-68; Rinehart et al., (1996) Plant Physiol 112:1331-41; Van Camp et al., (1996) Plant Physiol 112:525-35; Canevascini et al., (1996) Plant Physiol 112:513-524; Lam, (1994) Results Probl Cell Differ 20:181-96; and Guevara-Garcia et al., (1993) Plant J4:495-505. Leaf-preferred promoters include, for example, Yamamoto et al., (1997) Plant J 12:255-65; Kwon et al., (1994) Plant Physiol 105:357-67; Yamamoto et al., (1994) Plant Cell Physiol 35:773-8.

[0130] Seed-preferred promoters include both seed-specific promoters active during seed development, as well as seed-germinating promoters active during seed germination. See, Thompson et al., (1989) BioEssays 10:108. Seed-preferred promoters include, but are not limited to, Cim1 (cytokinin-induced message); cZ19B1 (maize 19 kDa zein); and milps (myo-inositol-1-phosphate synthase); and for example, those disclosed in WO2000011177 published 2 Mar. 2000 and U.S. Pat. No. 6,225,529. For dicots, seed-preferred promoters include, but are not limited to, bean β-phaseolin, napin, β-conglycinin, soybean lectin, cruciferin, and the like. For monocots, seed-preferred promoters include, but are not limited to, maize 15 kDa zein, 22 kDa zein, 27 kDa gamma zein, waxy, shrunken 1, shrunken 2, globulin 1, oleosin, and nuc1. See also, WO2000012733 published 9 Mar. 2000, where seed-preferred promoters from END1 and END2 genes are disclosed.

[0131] Chemical inducible (regulated) promoters can be used to modulate the expression of a gene in a prokaryotic and eukaryotic cell or organism through the application of an exogenous chemical regulator. The promoter may be a chemical-inducible promoter, where application of the chemical induces gene expression, or a chemical-repressible promoter, where application of the chemical represses gene expression. Chemical-inducible promoters include, but are not limited to, the maize In2-2 promoter, activated by benzene sulfonamide herbicide safeners (De Veylder et al., (1997) Plant Cell Physiol 38:568-77), the maize GST promoter (GST-II-27, WO1993001294 published 21 Jan. 1993), activated by hydrophobic electrophilic compounds used as pre-emergent herbicides, and the tobacco PR-1a promoter (Ono et al., (2004) Biosci Biotechnol Biochem 68:803-7) activated by salicylic acid. Other chemical-regulated promoters include steroid-responsive promoters (see, for example, the glucocorticoid-inducible promoter (Schena et al., (1991) Proc. Natl. Acad. Sci. USA 88:10421-5; McNellis et al., (1998) Plant J 14:247-257); tetracycline-inducible and tetracycline-repressible promoters (Gatz et al., (1991)Mol Gen Genet 227:229-37; U.S. Pat. Nos. 5,814,618 and 5,789,156).

[0132] Another example of an inducible promoter useful in plant cells, is the ZmCAS1 promoter, described in US20130312137 published 21 Nov. 2013. New promoters of various types useful in plant cells are constantly being discovered; numerous examples may be found in the compilation by Okamuro and Goldberg, (1989) In The Biochemistry ofPlants, Vol. 115, Stumpf and Conn, eds (New York, NY: Academic Press), pp. 1-82.

### Polynucleotide Constructs

[0133] One or more of the polynucleotide compositions herein may be provided to a cell as part of a expression construct, plasmid, or vector. Said construct may comprise one or more expression cassettes for transcription in the cell.

[0134] The transcriptional cassette will include in the 5′-3′ direction of transcription, a transcriptional and translational initiation region, a DNA sequence of interest, and a transcriptional and translational termination region functional in plants. The expression cassettes may contain one or more than one gene or nucleic acid sequence to be transferred and expressed in the transformed plant. Thus, each nucleic acid sequence will be operably linked to 5′ and 3′ regulatory sequences. Alternatively, multiple expression cassettes may be provided.

### Modification of a Target Polynucleotide in a Plant Cell

[0135] According to the presently disclosed methods, morphogenic factors are used to enhance the modification of a target site polynucleotide within a cell that is effected by DSB agent activity. Once a single or double-strand break is induced in the DNA, the cell's DNA repair mechanism is activated to repair the break. Error-prone DNA repair mechanisms can produce mutations at double-strand break sites. The most common repair mechanism to bring the broken ends together is the nonhomologous end-joining (NHEJ) pathway (Bleuyard et al., (2006) DNA Repair 5:1-12).

[0136] Homology-directed repair (HDR) is a mechanism in cells to repair double-stranded and single stranded DNA breaks. Homology-directed repair includes homologous recombination (HR) and single-strand annealing (SSA) (Lieber. 2010 Annu. Rev. Biochem. 79:181-211). The most common form of HDR is called homologous recombination (HR), which has the longest sequence homology requirements between the donor and acceptor DNA. Other forms of HDR include single-stranded annealing (SSA) and breakage-induced replication, and these require shorter sequence homology relative to HR. Homology-directed repair at nicks (single-stranded breaks) can occur via a mechanism distinct from HDR at double-strand breaks (Davis and Maizels. PNAS (0027-8424), 111 (10), p. E924-E932).

[0137] Alteration of the genome of a prokaryotic and eukaryotic cell or organism cell, for example, through homologous recombination (HR), is a powerful tool for genetic engineering.

### Target Sites

[0138] The target site may be part of the organism's native genome or integrated therein or may be present on an episomal polynucleotide. The genomic target sequence may be on any region of any chromosome, and may or may not be in a region encoding a protein or RNA. The target site may be native to the cell or heterologous. In some embodiments, the heterologous target sequence may have been transgenically inserted into the organism's genome, and may be on any region of any chromosome, including an artificial or satellite chromosome, and may or may not be in a region encoding a protein or RNA. In some aspects, the target site polynucleotide is of nuclear origin (genomic), and may be either endogenous to the cell or may be heterologous (e.g. an introduced transgene). In some aspects, the target site polynucleotide is a plasmid or vector that exists within the cell or has been introduced. In some aspects, the target site polynucleotide exists in the cytoplasm of the cell (extra-nuclear). In some aspects, the target site polynucleotide exists in another organelle of the cell (e.g. plastid or mitochondrion).It is recognized that the cell or the organism may comprise multiple target sites, which may be located at one or multiple loci within or across chromosomes. Multiple independent manipulations of each target site in the organism can be performed using the presently disclosed methods.

[0139] The target site comprises at least one recognition sequence. The length of the recognition site sequence can vary, and includes, for example, sequences that are at least about 3, 4, 6, 8, 10, 12, 14, 16, 18, 19, 20, 21, 22, 23, 24, 25, 26, 27, 28, 29, 30, 31, 32, 33, 34, 35, 36, 37, 38, 39, 40, 41, 42, 43, 44, 45, 46, 47, 48, 49, 50, 51, 52, 53, 54, 55, 56, 57, 58, 59, 60, 61, 62, 63, 64, 65, 66, 67, 68, 69, 70, 80, 90, 100, or more nucleotides in length. In some embodiments, the recognition site is of a sufficient length to only be present in a genome of an organism one time. In some embodiments, the recognition site is palindromic, that is, the sequence on one strand reads the same in the opposite direction on the complementary strand. The double-strand break-inducing agent recognizes the recognition sequence and introduces a double-strand break at or near the recognition sequence. The nick/cleavage site could be within the sequence that is specifically recognized by the agent or the nick/cleavage site could be outside of the sequence that is specifically recognized by the agent. In some embodiments, the double-strand break is introduced about 1, 2, 3, 4, 5, 6, 7, 8, 9, 10, 11, 12, 13, 14, 15, 16, 17, 18, 19, 20, 21, 22, 23, 24, 25, 26, 27, 28, 29, 30, 40, 50, 60, 70, 80, 90, 100, 110, 120, 130, 140, 150, 160, 170, 180, 190, 200, or more nucleotides away from the recognition sequence.

[0140] In some embodiments, the cleavage occurs at nucleotide positions immediately opposite each other to produce a blunt end cut or, in alternative embodiments, the cuts are staggered to produce single-stranded overhangs, also called “sticky ends”, which can be either 5′ overhangs, or 3′ overhangs. The recognition sequence can be endogenous (native) or heterologous to the plant cell. When the recognition site is an endogenous sequence, it may be recognized by a naturally-occurring, or native double-strand break-inducing agent. Alternatively, an endogenous recognition sequence may be recognized and/or bound by a modified or engineered double-strand break-inducing agent designed or selected to specifically recognize the endogenous recognition sequence to produce a double-strand break.

### Gene Targeting

[0141] The guide polynucleotide/Cas systems described herein can be used for gene targeting.

[0142] In general, DNA targeting can be performed by cleaving one or both strands at a specific polynucleotide sequence in a cell with a Cas protein associated with a suitable polynucleotide component. Once a single or double-strand break is induced in the DNA, the cell's DNA repair mechanism is activated to repair the break via nonhomologous end-joining (NHEJ) or Homology-Directed Repair (HDR) processes which can lead to modifications at the target site.

[0143] The length of the DNA sequence at the target site can vary, and includes, for example, target sites that are at least 12, 13, 14, 15, 16, 17, 18, 19, 20, 21, 22, 23, 24, 25, 26, 27, 28, 29, 30, or more than 30 nucleotides in length. It is further possible that the target site can be palindromic, that is, the sequence on one strand reads the same in the opposite direction on the complementary strand. The nick/cleavage site can be within the target sequence or the nick/cleavage site could be outside of the target sequence. In another variation, the cleavage could occur at nucleotide positions immediately opposite each other to produce a blunt end cut or, in other cases, the incisions could be staggered to produce single-stranded overhangs, also called “sticky ends” or “staggered end”, which can be either 5′ overhangs, or 3′ overhangs. Active variants of genomic target sites can also be used. Such active variants can comprise at least 65%, 70%, 75%, 80%, 85%, 90%, 91%, 92%, 93%, 94%, 95%, 96%, 97%, 98%, 99% or more sequence identity to the given target site, wherein the active variants retain biological activity and hence are capable of being recognized and cleaved by a Cas endonuclease.

[0144] Assays to measure the single or double-strand break of a target site by an endonuclease are known in the art and generally measure the overall activity and specificity of the agent on DNA substrates comprising recognition sites.

[0145] A targeting method herein can be performed in such a way that two or more DNA target sites are targeted in the method, for example. Such a method can optionally be characterized as a multiplex method. Two, three, four, five, six, seven, eight, nine, ten, or more target sites can be targeted at the same time in certain embodiments. A multiplex method is typically performed by a targeting method herein in which multiple different RNA components are provided, each designed to guide a guide polynucleotide/Cas endonuclease complex to a unique DNA target site.

[0146] The process for editing a genomic sequence combining DSB and modification templates generally comprises: introducing into a host cell a DSB-inducing agent, or a nucleic acid encoding a DSB-inducing agent, that recognizes a target sequence in the chromosomal sequence and is able to induce a DSB in the genomic sequence, and at least one polynucleotide modification template comprising at least one nucleotide alteration when compared to the nucleotide sequence to be edited. The polynucleotide modification template can further comprise nucleotide sequences flanking the at least one nucleotide alteration, in which the flanking sequences are substantially homologous to the chromosomal region flanking the DSB. Genome editing using DSB-inducing agents, such as Cas-gRNA complexes, has been described, for example in US20150082478 published on 19 Mar. 2015, WO2015026886 published on 26 Feb. 2015, WO2016007347 published 14 Jan. 2016, and WO2016025131 published on 18 Feb. 2016.

[0147] Some uses for guide RNA/Cas endonuclease systems have been described (see for example: US20150082478A1 published 19 Mar. 2015, WO2015026886 published 26 Feb. 2015, and US20150059010 published 26 Feb. 2015) and include but are not limited to modifying or replacing nucleotide sequences of interest (such as a regulatory elements), insertion of polynucleotides of interest, gene knock-out, gene-knock in, modification of splicing sites and/or introducing alternate splicing sites, modifications of nucleotide sequences encoding a protein of interest, amino acid and/or protein fusions, and gene silencing by expressing an inverted repeat into a gene of interest.

[0148] Proteins may be altered in various ways including amino acid substitutions, deletions, truncations, and insertions. Methods for such manipulations are generally known. For example, amino acid sequence variants of the protein(s) can be prepared by mutations in the DNA. Methods for mutagenesis and nucleotide sequence alterations include, for example, Kunkel, (1985) Proc. Natl. Acad. Sci. USA 82:488-92; Kunkel et al., (1987) Meth Enzymol 154:367-82; U.S. Pat. No. 4,873,192; Walker and Gaastra, eds. (1983) Techniques in Molecular Biology (MacMillan Publishing Company, New York) and the references cited therein. Guidance regarding amino acid substitutions not likely to affect biological activity of the protein is found, for example, in the model of Dayhoff et al., (1978) Atlas of Protein Sequence and Structure (Natl Biomed Res Found, Washington, D.C.). Conservative substitutions, such as exchanging one amino acid with another having similar properties, may be preferable. Conservative deletions, insertions, and amino acid substitutions are not expected to produce radical changes in the characteristics of the protein, and the effect of any substitution, deletion, insertion, or combination thereof can be evaluated by routine screening assays. Assays for double-strand-break-inducing activity are known and generally measure the overall activity and specificity of the agent on DNA substrates comprising target sites.

[0149] Described herein are methods for genome editing with CRISPR Associated (Cas) endonucleases. Following characterization of the guide RNA (or guide polynucleotide) and PAM sequence, a ribonucleoprotein (RNP) complex comprising the Cas endonuclease and the guide RNA (or guide polynucleotide) may be utilized to modify a target polynucleotide, including but not limited to: synthetic DNA, isolated genomic DNA, or chromosomal DNA in other organisms, including plants. To facilitate optimal expression and nuclear localization (for eukaryotic cells), the gene comprising the Cas endonuclease may be optimized, and then delivered into cells as DNA expression cassettes by methods known in the art. The components necessary to comprise an active RNP may also be delivered as RNA with or without modifications that protect the RNA from degradation or as mRNA capped or uncapped (Zhang, Y. et al., 2016, Nat. Commun. 7:12617) or Cas protein guide polynucleotide complexes (WO2017070032 published 27 Apr. 2017), or any combination thereof. Additionally, a part or part(s) of the complex may be expressed from a DNA construct while other components are delivered as RNA with or without modifications that protect the RNA from degradation or as mRNA capped or uncapped (Zhang et al. 2016 Nat. Commun. 7:12617) or Cas protein guide polynucleotide complexes (WO2017070032 published 27 Apr. 2017) or any combination thereof. To produce crRNAs in-vivo, tRNA derived elements may also be used to recruit endogenous RNAses to cleave crRNA transcripts into mature forms capable of guiding the complex to its DNA target site, as described, for example, in WO2017105991 published 22 Jun. 2017. Furthermore, the cleavage activity of the Cas endonuclease may be deactivated by altering key catalytic residues in its cleavage domain (Sinkunas, T. et al., 2013, EMBO J. 32:385-394) resulting in a RNA guided helicase that may be used to enhance homology directed repair, induce transcriptional activation, or remodel local DNA structures. Moreover, the activity of the Cas cleavage and helicase domains may both be knocked-out and used in combination with other DNA cutting, DNA nicking, DNA binding, transcriptional activation, transcriptional repression, DNA remodeling, DNA deamination, DNA unwinding, DNA recombination enhancing, DNA integration, DNA inversion, and DNA repair agents.

[0150] The transcriptional direction of the tracrRNA for the CRISPR-Cas system (if present) and other components of the CRISPR-Cas system (such as variable targeting domain, crRNA repeat, loop, anti-repeat) can be deduced as described in WO2016186946 published 24 Nov. 2016, and WO2016186953 published 24 Nov. 2016.

[0151] In one embodiment, the invention describes a method for modifying a target site in the genome of a cell, the method comprising introducing into a cell at least one PGEN described herein, and identifying at least one cell that has a modification at said target, wherein the modification at said target site is selected from the group consisting of (i) a replacement of at least one nucleotide, (ii) a deletion of at least one nucleotide, (iii) an insertion of at least one nucleotide, and (iv) any combination of (i)-(iii).

[0152] The nucleotide to be edited can be located within or outside a target site recognized and cleaved by a Cas endonuclease. In one embodiment, the at least one nucleotide modification is not a modification at a target site recognized and cleaved by a Cas endonuclease. In another embodiment, there are at least 1, 2, 3, 4, 5, 6, 7, 8, 9, 10, 11, 12, 13, 14, 15, 16, 17, 18, 19, 20, 21, 22, 23, 24, 25, 26, 27, 30, 40, 50, 100, 200, 300, 400, 500, 600, 700, 900 or 1000 nucleotides between the at least one nucleotide to be edited and the genomic target site.

[0153] A knock-out may be produced by an indel (insertion or deletion of nucleotide bases in a target DNA sequence through NHEJ), or by specific removal of sequence that reduces or destroys the function of sequence at or near the targeting site.

[0154] A guide polynucleotide/Cas endonuclease induced targeted mutation can occur in a nucleotide sequence that is located within or outside a genomic target site that is recognized and cleaved by the Cas endonuclease.

[0155] The method for editing a nucleotide sequence in the genome of a cell can be a method without the use of an exogenous selectable marker by restoring function to a non-functional gene product.

[0156] In one embodiment, the invention describes a method for modifying a target site in the genome of a cell, the method comprising introducing into a cell at least one PGEN described herein and at least one donor DNA, wherein said donor DNA comprises a polynucleotide of interest, and optionally, further comprising identifying at least one cell that said polynucleotide of interest integrated in or near said target site.

[0157] In one aspect, the methods disclosed herein may employ homologous recombination (HR) to provide integration of the polynucleotide of interest at the target site.

[0158] Various methods and compositions can be employed to produce a cell or organism having a polynucleotide of interest inserted in a target site via activity of a CRISPR-Cas system component described herein. In one method described herein, a polynucleotide of interest is introduced into the organism cell via a donor DNA construct. As used herein, “donor DNA” is a DNA construct that comprises a polynucleotide of interest to be inserted into the target site of a Cas endonuclease. The donor DNA construct further comprises a first and a second region of homology that flank the polynucleotide of interest. The first and second regions of homology of the donor DNA share homology to a first and a second genomic region, respectively, present in or flanking the target site of the cell or organism genome.

[0159] The donor DNA can be tethered to the guide polynucleotide. Tethered donor DNAs can allow for co-localizing target and donor DNA, useful in genome editing, gene insertion, and targeted genome regulation, and can also be useful in targeting post-mitotic cells where function of endogenous HR machinery is expected to be highly diminished (Mali et al., 2013, Nature Methods Vol. 10: 957-963).

[0160] The guide polynucleotide/Cas endonuclease system can be used in combination with at least one polynucleotide modification template to allow for editing (modification) of a genomic nucleotide sequence of interest. (See also US20150082478, published 19 Mar. 2015 and WO2015026886 published 26 Feb. 2015).

[0161] Polynucleotides of interest and/or traits can be stacked together in a complex trait locus as described in WO2012129373 published 27 Sep. 2012, and in WO2013112686, published 1 Aug. 2013. The guide polynucleotide/Cas endonuclease system described herein provides for an efficient system to generate double-strand breaks and allows for traits to be stacked in a complex trait locus.

[0162] In addition to the double-strand break inducing agents, site-specific base conversions can also be achieved to engineer one or more nucleotide changes to create one or more edits into the genome. These include for example, a site-specific base edit mediated by an C·G to T·A or an A·T to G·C base editing deaminase enzymes (Gaudelli et al., Programmable base editing of A·T to G·C in genomic DNA without DNA cleavage.” Nature (2017); Nishida et al. “Targeted nucleotide editing using hybrid prokaryotic and vertebrate adaptive immune systems.” Science 353 (6305) (2016); Komor et al. “Programmable editing of a target base in genomic DNA without double-stranded DNA cleavage.” Nature 533 (7603) (2016):420-4. A catalytically “dead” or inactive Cas9 (dCas9), for example a catalytically inactive “dead” version of a Cas9 ortholog disclosed herein, fused to a cytidine deaminase or an adenine deaminase protein becomes a specific base editor that can alter DNA bases without inducing a DNA break. Base editors convert C->T (or G->A on the opposite strand) or an adenine base editor that would convert adenine to inosine, resulting in an A->G change within an editing window specified by the gRNA.

### Introduction of Components

[0163] The methods and compositions described herein do not depend on a particular method for introducing a sequence into an organism or cell, only that the polynucleotide or polypeptide gains access to the interior of at least one cell of the organism. Introducing includes reference to the incorporation of a nucleic acid into a eukaryotic or prokaryotic cell where the nucleic acid may be incorporated into the genome of the cell, and includes reference to the transient (direct) provision of a nucleic acid, protein or polynucleotide-protein complex (PGEN, RGEN) to the cell. This does not include transient expression of genes from a T-strand where the gene is not integrated. In this case, the T-strand has moved from the Agrobacterium into the nucleus of a cell where only transient expression but not integration occurs.

[0164] Methods for introducing polynucleotides or polypeptides or a polynucleotide-protein complex into cells or organisms are known in the art including, but not limited to, microinjection, electroporation, stable transformation methods, transient transformation methods, ballistic particle acceleration (particle bombardment), whiskers mediated transformation, Agrobacterium-mediated transformation, direct gene transfer, viral-mediated introduction, transfection, transduction, cell-penetrating peptides, mesoporous silica nanoparticle (MSN)-mediated direct protein delivery, topical applications, sexual crossing, sexual breeding, and any combination thereof.

[0165] For example, the guide polynucleotide (guide RNA, crNucleotide+tracrNucleotide, guide DNA and/or guide RNA-DNA molecule) can be introduced into a cell directly (transiently) as a single stranded or double stranded polynucleotide molecule. The guide RNA (or crRNA+tracrRNA) can also be introduced into a cell indirectly by introducing a recombinant DNA molecule comprising a heterologous nucleic acid fragment encoding the guide RNA (or crRNA+tracrRNA), operably linked to a specific promoter that is capable of transcribing the guide RNA (crRNA+tracrRNA molecules) in said cell. The specific promoter can be, but is not limited to, a RNA polymerase III promoter, which allow for transcription of RNA with precisely defined, unmodified, 5′- and 3′-ends (Ma et al., 2014, Mol. Ther. Nucleic Acids 3:e161; DiCarlo et al., 2013, Nucleic Acids Res. 41: 4336-4343; WO2015026887, published 26 Feb. 2015). Any promoter capable of transcribing the guide RNA in a cell can be used and includes a heat shock/heat inducible promoter operably linked to a nucleotide sequence encoding the guide RNA.

[0166] The Cas endonuclease, such as the Cas endonuclease described herein, can be introduced into a cell by directly introducing the Cas polypeptide itself (referred to as direct delivery of Cas endonuclease), the mRNA encoding the Cas protein, and/or the guide polynucleotide/Cas endonuclease complex itself, using any method known in the art. The Cas endonuclease can also be introduced into a cell indirectly by introducing a recombinant DNA molecule that encodes the Cas endonuclease. The endonuclease can be introduced into a cell transiently or can be incorporated into the genome of the host cell using any method known in the art. Uptake of the endonuclease and/or the guided polynucleotide into the cell can be facilitated with a Cell Penetrating Peptide (CPP) as described in WO2016073433 published 12 May 2016. Any promoter capable of expressing the Cas endonuclease in a cell can be used and includes a heat shock/heat inducible promoter operably linked to a nucleotide sequence encoding the Cas endonuclease.

[0167] Direct delivery of a polynucleotide modification template into plant cells can be achieved through particle mediated delivery, and any other direct method of delivery, such as but not limiting to, polyethylene glycol (PEG)-mediated transfection to protoplasts, whiskers mediated transformation, electroporation, particle bombardment, cell-penetrating peptides, or mesoporous silica nanoparticle (MSN)-mediated direct protein delivery can be successfully used for delivering a polynucleotide modification template in eukaryotic cells, such as plant cells.

[0168] The donor DNA can be introduced by any means known in the art. The donor DNA may be provided by any transformation method known in the art including, for example, Agrobacterium-mediated transformation or biolistic particle bombardment. The donor DNA may be present transiently in the cell or it could be introduced via a viral replicon. In the presence of the Cas endonuclease and the target site, the donor DNA is inserted into the transformed plant's genome.

[0169] Direct delivery of any one of the guided Cas system components can be accompanied by direct delivery (co-delivery) of other mRNAs that can promote the enrichment and/or visualization of cells receiving the guide polynucleotide/Cas endonuclease complex components. For example, direct co-delivery of the guide polynucleotide/Cas endonuclease components (and/or guide polynucleotide/Cas endonuclease complex itself) together with mRNA encoding phenotypic markers (such as but not limiting to transcriptional activators such as CRC (Bruce et al. 2000 The Plant Cell 12:65-79) can enable the selection and enrichment of cells without the use of an exogenous selectable marker by restoring function to a non-functional gene product as described in WO2017070032 published 27 Apr. 2017.

[0170] The crc gene, when stably transformed into a cell, can render that cell unable to regenerate (confer anti-regeneration properties upon that cell). Transient transformation of a cell with crc would enable the cell to be selected, as it would serve as a marker for successful non-integration of the vector components included with the crc gene. Other examples of polynucleotides or genes that confer a useful phenotype (such as a stimulated growth or morphogenic response) during the period after transformation but before regeneration of a plant include but are not limited to WUS, BBM (or ODP2), BBM2, LEC2, KN1, IPT, MONOPTERUS-DELTA, LEC1, FUSCA, ABI3, SERK, and AGL15. Anti-regeneration genes can include genes from Agrobacterium that stimulate a growth response such as IPT, AV-6b, IAAm, and IAAh. Anti-regeneration genes can also include plant cell cycle genes such as CycA, CycB, CycD, and viral genes that simulate the cell cycle such as Wheat Dwarf Virus RepA, or the Malvastrum Yellow Vien Virus C4 gene. Generally, factors that impede normal regeneration and normal plant fertility can be used to provide the anti-regeneration property.

[0171] Introducing a guide RNA/Cas endonuclease complex described herein, into a cell includes introducing the individual components of said complex either separately or combined into the cell, and either directly (direct delivery as RNA for the guide and protein for the Cas endonuclease and Cas protein subunits, or functional fragments thereof) or via recombination constructs expressing the components (guide RNA, Cas endonuclease, Cas protein subunits, or functional fragments thereof). Introducing a guide RNA/Cas endonuclease complex (RGEN) into a cell includes introducing the guide RNA/Cas endonuclease complex as a ribonucleotide-protein into the cell. The ribonucleotide-protein can be assembled prior to being introduced into the cell as described herein. The components comprising the guide RNA/Cas endonuclease ribonucleotide protein (at least one Cas endonuclease, at least one guide RNA, at least one Cas protein subunits) can be assembled in vitro or assembled by any means known in the art prior to being introduced into a cell (targeted for genome modification as described herein).

[0172] Plant cells differ from human and animal cells in that plant cells comprise a plant cell wall which may act as a barrier to the direct delivery of the RGEN ribonucleoproteins and/or of the direct delivery of the RGEN components.

[0173] Direct delivery of the RGEN ribonucleoproteins into plant cells can be achieved through particle mediated delivery (particle bombardment. Based on the experiments described herein, a skilled artesian can now envision that any other direct method of delivery, such as but not limiting to, polyethylene glycol (PEG)-mediated transfection to protoplasts, electroporation, cell-penetrating peptides, or mesoporous silica nanoparticle (MSN)-mediated direct protein delivery, can be successfully used for delivering RGEN ribonucleoproteins into plant cells.

[0174] Direct delivery of the RGEN ribonucleoprotein, allows for genome editing at a target site in the genome of a cell which can be followed by rapid degradation of the complex, and only a transient presence of the complex in the cell. This transient presence of the RGEN complex may lead to reduced off-target effects. In contrast, delivery of RGEN components (guide RNA, Cas endonuclease) via plasmid DNA sequences can result in constant expression of RGENs from these plasmids which can intensify off target effects (Cradick, T. J. et al. (2013) Nucleic Acids Res 41:9584-9592; Fu, Y et al. (2014) Nat. Biotechnol. 31:822-826).

[0175] Direct delivery can be achieved by combining any one component of the guide RNA/Cas endonuclease complex (RGEN) (such as at least one guide RNA, at least one Cas protein, and at least one Cas protein), with a particle delivery matrix comprising a microparticle (such as but not limited to of a gold particle, tungsten particle, and silicon carbide whisker particle) (see also WO2017070032 published 27 Apr. 2017).

[0176] In one aspect, the guide polynucleotide/Cas endonuclease complex is a complex wherein the guide RNA and Cas endonuclease protein forming the guide RNA/Cas endonuclease complex are introduced into the cell as RNA and protein, respectively. In one aspect, the guide polynucleotide/Cas endonuclease complex is a complex wherein the guide RNA and Cas endonuclease protein and the at least one protein subunit of a Cas protein forming the guide RNA/Cas endonuclease complex are introduced into the cell as RNA and proteins, respectively. In one aspect, the guide polynucleotide/Cas endonuclease complex is a complex wherein the guide RNA and Cas endonuclease protein and the at least one protein subunit of a Cascade forming the guide RNA/Cas endonuclease complex (cleavage ready cascade) are preassembled in vitro and introduced into the cell as a ribonucleotide-protein complex.

[0177] Alternatively, polynucleotides may be introduced into plant or plant cells by contacting cells or organisms with a virus or viral nucleic acids. Generally, such methods involve incorporating a polynucleotide within a viral DNA or RNA molecule. In some examples a polypeptide of interest may be initially synthesized as part of a viral polyprotein, which is later processed by proteolysis in vivo or in vitro to produce the desired recombinant protein.

[0178] The polynucleotide or recombinant DNA construct can be provided to or introduced into a prokaryotic and eukaryotic cell or organism using a variety of transient transformation methods. Such transient transformation methods include, but are not limited to, the introduction of the polynucleotide construct directly into the plant.

[0179] Nucleic acids and proteins can be provided to a cell by any method including methods using molecules to facilitate the uptake of anyone or all components of a guided Cas system (protein and/or nucleic acids), such as cell-penetrating peptides and nanocarriers. See also US20110035836 published 10 Feb. 2011, and EP2821486A1 published 7 Jan. 2015.

[0180] Other methods of introducing polynucleotides into a prokaryotic and eukaryotic cell or organism or plant part can be used, including plastid transformation methods, and the methods for introducing polynucleotides into tissues from seedlings or mature seeds.

[0181] Stable transformation is intended to mean that the nucleotide construct introduced into an organism integrates into a genome of the organism and is capable of being inherited by the progeny thereof. Transient transformation is intended to mean that a polynucleotide is introduced into the organism and does not integrate into a genome of the organism or a polypeptide is introduced into an organism. Transient transformation indicates that the introduced composition is only temporarily expressed or present in the organism.

[0182] A variety of methods are available to identify those cells having an altered genome at or near a target site without using a screenable marker phenotype. Such methods can be viewed as directly analyzing a target sequence to detect any change in the target sequence, including but not limited to PCR methods, sequencing methods, nuclease digestion, Southern blots, and any combination thereof.

[0183] The presently disclosed polynucleotides and polypeptides can be introduced into a cell. Cells include, but are not limited to, human, non-human, animal, mammalian, bacterial, protist, fungal, insect, yeast, non-conventional yeast, and plant cells, as well as plants and seeds produced by the methods described herein. In some aspects, the cell of the organism is a reproductive cell, a somatic cell, a meiotic cell, a mitotic cell, a stem cell, or a pluripotent stem cell.

### Cells and Plants

[0184] The presently disclosed polynucleotides and polypeptides can be introduced into a plant cell. Plant cells include, well as plants and seeds produced by the methods described herein. Any plant can be used with the compositions and methods described herein, including monocot and dicot plants, and plant elements.

[0185] The compositions herein may be used to edit the genome of a plant cell in various ways. In one aspect, it may be desirable to delete one or more nucleotides. In another aspect, it may be desirable to insert one or more nucleotides. In one aspect, it may be desirable to replace one or more nucleotides. In another aspect, it may be desirable to modify one or more nucleotides via a covalent or non-covalent interaction with another atom or molecule. In some aspects, the cell is diploid. In some aspects, the cell is haploid.

[0186] Genome modification via a Cas endonuclease may be used to effect a genotypic and/or phenotypic change on the target organism. Such a change is preferably related to an improved trait of interest or an agronomically-important characteristic, the correction of an endogenous defect, or the expression of some type of expression marker. In some aspects, the trait of interest or agronomically-important characteristic is related to the overall health, fitness, or fertility of the plant, the yield of a plant product, the ecological fitness of the plant, or the environmental stability of the plant. In some aspects, the trait of interest or agronomically-important characteristic is selected from the group consisting of: agronomics, herbicide resistance, insecticide resistance, disease resistance, nematode resistance, microbial resistance, fungal resistance, viral resistance, fertility or sterility, grain characteristics, commercial product production. In some aspects, the trait of interest or agronomically-important characteristic is selected from the group consisting of: disease resistance, drought tolerance, heat tolerance, cold tolerance, salinity tolerance, metal tolerance, herbicide tolerance, improved water use efficiency, improved nitrogen utilization, improved nitrogen fixation, pest resistance, herbivore resistance, pathogen resistance, yield improvement, health enhancement, vigor improvement, growth improvement, photosynthetic capability improvement, nutrition enhancement, altered protein content, altered starch content, altered carbohydrate content, altered sugar content, altered fiber content, altered oil content, increased biomass, increased shoot length, increased root length, improved root architecture, modulation of a metabolite, modulation of the proteome, increased seed weight, altered seed carbohydrate composition, altered seed oil composition, altered seed protein composition, altered seed nutrient composition, as compared to an isoline plant not comprising a modification derived from the methods or compositions herein.

[0187] Examples of monocot plants that can be used include, but are not limited to, corn (Zea mays), rice (Oryza sativa), rye (Secale cereale), sorghum (Sorghum bicolor, Sorghum vulgare), millet (e.g., pearl millet (Pennisetum glaucum), proso millet (Panicum miliaceum), foxtail millet (Setaria italica), finger millet (Eleusine coracana), wheat (Triticum species, for example Triticum aestivum, Triticum monococcum), sugarcane (Saccharum spp.), oats (Avena), barley (Hordeum), switchgrass (Panicum virgatum), pineapple (Ananas comosus), banana (Musa spp.), palm, ornamentals, turfgrasses, and other grasses.

[0188] Examples of dicot plants that can be used include, but are not limited to, soybean (Glycine max), Brassica species (for example but not limited to: oilseed rape or Canola) (Brassica napus, B. campestris, Brassica rapa, Brassica juncea), alfalfa (Medicago sativa), tobacco (Nicotiana tabacum), Arabidopsis (Arabidopsis thaliana), sunflower (Helianthus annuus), cotton (Gossypium arboreum, Gossypium barbadense), peanut (Arachis hypogaea), tomato (Solanum lycopersicum), potato (Solanum tuberosum), various fruit trees, and cannabis.

[0189] Additional plants that can be used include safflower (Carthamus tinctorius), sweet potato (Ipomoea batatus), cassava (Manihot esculenta), coffee (Coffea spp.), coconut (Cocos nucifera), citrus trees (Citrus spp.), cocoa (Theobroma cacao), tea (Camellia sinensis), banana (Musa spp.), avocado (Persea americana), fig (Ficus casica), guava (Psidium guajava), mango (Mangifera indica), olive (Olea europaea), papaya (Caricapapaya), cashew (Anacardium occidentale), macadamia (Macadamia integrifolia), almond (Prunus amygdalus), sugar beets (Beta vulgaris), vegetables, ornamentals, and conifers.

[0190] Vegetables that can be used include tomatoes (Lycopersicon esculentum), lettuce (e.g., Lactuca sativa), green beans (Phaseolus vulgaris), lima beans (Phaseolus limensis), peas (Lathyrus spp.), and members of the genus Cucumis such as cucumber (C. sativus), cantaloupe (C. cantalupensis), and musk melon (C. melo). Ornamentals include azalea (Rhododendron spp.), hydrangea (Macrophylla hydrangea), hibiscus (Hibiscus rosasanensis), roses (Rosa spp.), tulips (Tulipa spp.), daffodils (Narcissus spp.), petunias (Petunia hybrida), carnation (Dianthus caryophyllus), poinsettia (Euphorbia pulcherrima), and chrysanthemum.

[0191] Conifers that may be used include pines such as loblolly pine (Pinus taeda), slash pine (Pinus elliotii), ponderosa pine (Pinus ponderosa), lodgepole pine (Pinus contorta), and Monterey pine (Pinus radiata); Douglas fir (Pseudotsuga menziesii); Western hemlock (Tsuga canadensis); Sitka spruce (Picea glauca); redwood (Sequoia sempervirens); true firs such as silver fir (Abies amabilis) and balsam fir (Abies balsamea); and cedars such as Western red cedar (Thuja plicata) and Alaska yellow cedar (Chamaecyparis nootkatensis).

[0192] In certain embodiments of the disclosure, a fertile plant is a plant that produces viable male and female gametes and is self-fertile. Such a self-fertile plant can produce a progeny plant without the contribution from any other plant of a gamete and the genetic material comprised therein. Other embodiments of the disclosure can involve the use of a plant that is not self-fertile because the plant does not produce male gametes, or female gametes, or both, that are viable or otherwise capable of fertilization.

[0193] The present disclosure finds use in the breeding of plants comprising one or more introduced traits, or edited genomes.

[0194] A non-limiting example of how two traits can be stacked into the genome at a genetic distance of, for example, 5 cM from each other is described as follows: A first plant comprising a first transgenic target site integrated into a first DSB target site within the genomic window and not having the first genomic locus of interest is crossed to a second transgenic plant, comprising a genomic locus of interest at a different genomic insertion site within the genomic window and the second plant does not comprise the first transgenic target site. About 5% of the plant progeny from this cross will have both the first transgenic target site integrated into a first DSB target site and the first genomic locus of interest integrated at different genomic insertion sites within the genomic window. Progeny plants having both sites in the defined genomic window can be further crossed with a third transgenic plant comprising a second transgenic target site integrated into a second DSB target site and/or a second genomic locus of interest within the defined genomic window and lacking the first transgenic target site and the first genomic locus of interest. Progeny are then selected having the first transgenic target site, the first genomic locus of interest and the second genomic locus of interest integrated at different genomic insertion sites within the genomic window. Such methods can be used to produce a transgenic plant comprising a complex trait locus having at least 1, 2, 3, 4, 5, 6, 7, 8, 9, 10, 11, 12, 13, 14, 15, 16, 17, 19, 19, 20, 21, 22, 23, 24, 25, 26, 27, 28, 29, 30, 31 or more transgenic target sites integrated into DSB target sites and/or genomic loci of interest integrated at different sites within the genomic window. In such a manner, various complex trait loci can be generated.

[0195] While the invention has been particularly shown and described with reference to a preferred embodiment and various alternate embodiments, it will be understood by persons skilled in the relevant art that various changes in form and details can be made therein without departing from the spirit and scope of the invention. For instance, while the particular examples below may illustrate the methods and embodiments described herein using a specific plant, the principles in these examples may be applied to any plant. Therefore, it will be appreciated that the scope of this invention is encompassed by the embodiments of the inventions recited herein and in the specification rather than the specific examples that are exemplified below. All cited patents and publications referred to in this application are herein incorporated by reference in their entirety, for all purposes, to the same extent as if each were individually and specifically incorporated by reference.

### EXAMPLES

[0196] The following are examples of specific embodiments of some aspects of the invention. The examples are offered for illustrative purposes only, and are not intended to limit the scope of the invention in any way. Efforts have been made to ensure accuracy with respect to numbers used (e.g., amounts, temperatures, etc.), but some experimental error and deviation should, of course, be allowed for.

[0197] The meaning of abbreviations is as follows: “sec” means second(s), “min” means minute(s), “h” means hour(s), “d” means day(s), “μL” or “uL” or “μl” or “ul” means microliter(s), “mL” means milliliter(s), “L” means liter(s), “μM” means micromolar, “mM” means millimolar, “M” means molar, “mmol” means millimole(s), “μmole” or “umole” mean micromole(s), “g” means gram(s), “μg” or “ug” means microgram(s), “ng” means nanogram(s), “U” means unit(s), “bp” means base pair(s) and “kB” means kilobase(s).

### Example 1: Plasmids

[0198] Plasmids comprising T-DNA described in Table 1 were used in experiments described herein below.

TABLE 1
Plasmid Compositions:

| SEQ | | |
|---|---|---|
| ID | | |
| NO: | Plasmid ID | T-DNA comprises these components: |
| 1 | PHP21139 | ZM-IN2-2 PRO::ZM-WUS2::ZM-IN2-1 TERM |
| 2 | PHP22297 | FRT1:BAR + UBI PRO::CFP::PINII TERM + FRT87 |
| 3 | PHP5096 | UBI PRO::FLP::PINII TERM |
| 4 | PHP21875 | UBI PRO::ZM-ODP2::PINII |
| 5 | PHP89030 | PLTP PRO::ZM-ODP2::OS-T28 TERM |
| 6 | PHP89179 | PLTP PRO::ZM-WUS2::IN2-1 TERM |
| 7 | T-DNA from | RB + BUFFER1 + MINI-ALLSTOPS3 + PSA2 + LOXP + ATTB4 + |
| | RV022904 | ZM-SEQ11 (GENOMIC) (EDH5G) + UBI1ZM PRO::NPTII (MO1): |
| | | SB-UBI TERM + ZM-SEQ12 (GENOMIC) (EDH5G) + ATTB2 + |
| | | SB-UBI PRO + SB-UBI INTRON1::ZS-GREEN1: OS-UBI TERM + |
| | | MINI-ALLSTOPS + ATTB3 + LOXP + MINI-ALLSTOPS + PSB1 + |
| | | MINI-ALLSTOPS + MINI-ALLSTOPS4 + LB |
| 8 | T-DNA from | RB + BUFFER1 + PSE(3.1) + ATTB4 + FMV ENHANCER + PCSV |
| | RV022905 | ENH + MMV ENH + ZM-PLTP PRO::ZM-WUS2 (ALT1):IN2-1 |
| | | TERM + PSW1 + ATTB1 + UBI1ZM PRO::SV40 NLS: CAS9 |
| | | EXON1 (SP) (MO):ST-LS1 INTRON2: CAS9 EXON2 (SP) |
| | | (MO):VIRD2 NLS:SB-UBI TERM + PSN1 + ZM-U6 POLIII CHR8 |
| | | PRO: ZM CHR1-53.66-45CR1: GUIDE RNA: ZM-U6 POLIII CHR8 |
| | | TERM + PSN2 + ATTB2 + NOS PRO::CRC (ALT6):SB-GKAF |
| | | TERM (MOD1) |
| 9 | T-DNA from | RB + BUFFER1 + PSE (3.1) + ATTB4 + FMV ENHANCER + |
| | RV022901 | PCSV ENH + MMV ENH + ZM-PLTP PRO::ZM-WUS2 |
| | | (ALT1):IN2-1 TERM + PSW1 + ATTB1 + UBI1ZM PRO::SV40 |
| | | NLS: CAS9 EXON1 (SP) (MO):ST-LS1 INTRON2: CAS9 EXON2 |
| | | (SP) (MO):VIRD2 NLS:SB-UBI TERM + PSN1 + ATTB2 + NOS |
| | | PRO::CRC (ALT6): SB-GKAF TERM (MOD1) + ATTB3 + PSH + |
| | | LB |
| 10 | T-DNA from | RB + BUFFER1 + MINI-ALLSTOPS3 + PSA2 + LOXP + ATTB4 + |
| | RV022903 | ZM-U6 POLIII CHR8 PRO: ZM CHR1-53.66-45CR1 + GUIDE |
| | | RNA:ZM-U6 POLIII CHR8 TERM + PSN2 + ZM-SEQ11 |
| | | (GENOMIC) (EDH5G) + UBI1ZM PRO::NPTII (MO1): SB-UBI |
| | | TERM + ZM-SEQ12 (GENOMIC) (EDH5G) + ATTB2 + SB-UBI |
| | | PRO::ZS-GREEN1:OS-UBI TERM + MINI-ALLSTOPS + ATTB3 + |
| | | LOXP + MINI-ALLSTOPS + PSB1 + MINI-ALLSTOPS + MINI- |
| | | ALLSTOPS4 + LB |
| 11 | T-DNA from | RB + BUFFER1 + PSE (3.1) + ATTB4 + FMV ENHANCER + |
| | RV022900 | PCSV ENH + MMV ENH + ZM-PLTP PRO::ZM-WUS2 |
| | | (ALT1)(TR2)-V1:TAV-T2A:(MO1)SV40 NLS:CAS9 EXON1 (SP) |
| | | (MO):ST-LS1 INTRON2: CAS9 EXON2 (SP) (MO):VIRD2 |
| | | NLS:SB-UBI TERM + PSN1 + ATTB2 + NOS PRO::CRC |
| | | (ALT6):SB-GKAF TERM (MOD1) + ATTB3 + PSH + LB |
| 12 | T-DNA from | RB + BUFFER1 + MINI-ALLSTOPS3 + PSA2 + LOXP + ATTB4 + |
| | PHV00025 | ZM CHR1-53.66-45CR1 TARGET SITE + ZM-SEQ11 (GENOMIC) |
| | | (EDH5G) + UBI1ZM PRO::NPTII (MO1): SB-UBI TERM + ZM- |
| | | SEQ12 (GENOMIC) (EDH5G) + ZM CHR1-53.66-45CR1 TARGET |
| | | SITE + ATTB2 + SB-UBI PRO + SB-UBI INTRON1::ZS-GREEN1: |
| | | OS-UBI TERM + MINI-ALLSTOPS + ATTB3 + LOXP + MINI- |
| | | ALLSTOPS + PSB1 + MINI-ALLSTOPS + MINI-ALLSTOPS4 + |
| | | LB |
| 13 | Synthetic plasmid | REP A (AR) (ALT1) + REP B (AR) + REP C (AR) (MOD1) + SPC |
| | PHV00026 | (VER2) + NPTII + PUC ORI + nopalineRB + BUFFER1 + MINI- |
| | | ALLSTOPS3 + PSA2 + FMV ENHANCER + PCSV ENH + MMV |
| | | ENH + ZM-PLTP PRO::ZM-WUS2 (ALT1):IN2-1 TERM + PSW1 + |
| | | ATTB1 + UBI1ZM PRO::SV40 NLS: CAS9 EXON1 (SP) (MO):ST- |
| | | LS1 INTRON2: CAS9 EXON2 (SP) (MO):VIRD2 NLS:SB-UBI |
| | | TERM + PSN1 + ATTB2 + ZM-U6 POLIII CHR8 PRO: ZM CHR1- |
| | | 53.66-45CR1: GUIDE RNA: ZM-U6 POLIII CHR8 TERM + PSN2 + |
| | | NOS PRO::CRC (ALT6):SB-GKAF TERM (MOD1) + ATTB3 + |
| | | PSH + LB |
| 14 | Synthetic plasmid | GENTAMYCIN + PVS1 ORI + RB + BUFFER1 + MINI- |
| | PHV00027 | ALLSTOPS3 + PSA2 + ZM-SEQ11 (GENOMIC) (EDH5G) + |
| | | UBI1ZM PRO::NPTII (MO1): SB-UBI TERM + ZM-SEQ12 |
| | | (GENOMIC) (EDH5G) + ATTB2 + SB-UBI PRO::ZS-GREEN1:OS- |
| | | UBI TERM + MINI-ALLSTOPS + ATTB3 + LOXP + MINI- |
| | | ALLSTOPS + PSB1 + MINI-ALLSTOPS + MINI-ALLSTOPS4 + |
| | | LB |
| 15 | T-DNA from | RB + LOXP + NOS PRO::ZM-WUS2::IN2-1 TERM + FMV |
| | PHV00022 | ENHANCER::PCSV ENH::MMV ENH::UBI1ZM PRO::UBI1ZM |
| | | 5UTR::UBI1ZM INTRON1::ZM-ODP2::OS-T28 TERM + HSP17.7 |
| | | PRO::CRE EXON1::ST-LS1 INTRON2::CRE EXON2::PINII TERM + |
| | | LOXP + UBI1ZM PRO::UBI1ZM 5UTR::UBI1ZM |
| | | INTRON1::SV40 NLS:CAS9 EXON1 (MO)::ST-LSI |
| | | INTRON2::CAS9 EXON2 (MO):VIRD2 NLS::PINII TERM + |
| | | UBI1ZM PRO::UBI1ZM 5UTR::UBI1ZM INTRON1::NPTII::PINII |
| | | TERM + SB-UBI PRO::SB-UBI INTRON1::ZS-GREEN::OS-UBI |
| | | TERM + LB |
| 16 | T-DNA from | RB + LOXP + NOS PRO::ZM-WUS2::IN2-1 TERM + FMV |
| | PHV00023 | ENHANCER::PCSV ENH::MMV ENH::UBI1ZM PRO::UBI1ZM |
| | | 5UTR::UBI1ZM INTRON1::ZM-ODP2::OS-T28 TERM + HSP17.7 |
| | | PRO::CRE EXON1::ST-LS1 INTRON2::CRE EXON2::PINII TERM + |
| | | LOXP + UBI1ZM PRO::UBI1ZM 5UTR::UBI1ZM |
| | | INTRON1::SV40 NLS:CAS9 EXON1 (MO)::ST-LSI |
| | | INTRON2::CAS9 EXON2 (MO):VIRD2 NLS::PINII TERM + ZM- |
| | | U6 POLIII CHR8 PRO::ZM-ALS-CR7 GRNA::ZM-U6 POLIII |
| | | CHR8 TERM + ZM-U6 POLIII CHR8 PRO::ZM-WXY-CR4 |
| | | GRNA::ZM-U6 POLIII CHR8 TERM + ZM-U6 POLIII CHR8 |
| | | PRO::ZM-WXY-CR8 GRNA::ZM-U6 POLIII CHR8 TERM + SB- |
| | | UBI PRO::SB-UBI INTRON1::ZS-GREEN::OS-UBI TERM + LB |
| 17 | T-DNA from | RB + ZM-U6 POLIII CHR8 PRO::ZM-WXY-CR4 GRNA::ZM-U6 |
| | PHV00024 | POLIII CHR8 TERM + + ZM-U6 POLIII CHR8 PRO::ZM-WXY- |
| | | CR8 GRNA::ZM-U6 POLIII CHR8 TERM + ZM-U6 POLIII CHR8 |
| | | PRO::ZM-ALS-CR7 GRNA::ZM-U6 POLIII CHR8 TERM + |
| | | UBI1ZM PRO::UBI1ZM 5UTR::UBI1ZM INTRON1::DS- |
| | | RED2::PINII TERM + LB |
| 18 | CBF1A | Maize-optimized CBF1a activation domain coding sequence |
| 19 | CBF1A | Encoded CBF1A activation domain |
| 20 | PHP86489 | NOS PRO::CRC::SB-GKAF TERM |
| 21 | PHP665 synthetic | CAMV 35S ENH::CAMV 35S PRO::ADH INTRON1::C1::PINII |
| | construct | TERM |
| 22 | PV225 synthetic | UBI1ZM PRO::UBI1ZM 5UTR::UBI1ZM INTRON1::SV40 |
| | construct | NLS:CAS9 EXON1 (MO)::ST-LSI INTRON2::CAS9 EXON2 |
| | | (MO):VIRD2 NLS::PINII TERM |
| 23 | PV521 synthetic | ZM-U6 POLIII CHR8 PRO::ZM-R1 GRNA::ZM-U6 POLIII CHR8 |
| | construct | TERM |
| 24 | PV523 synthetic | ZM-U6 POLIII CHR8 PRO::ZM-R2 GRNA::ZM-U6 POLIII CHR8 |
| | construct | TERM |
| 25 | PV528 synthetic | ZM-U6 POLIII CHR8 PRO::ZM-R3 GRNA::ZM-U6 POLIII CHR8 |
| | construct | TERM |
| 26 | CAS-ALPHA10 | Synthetic sequence encoding the CAS-ALPHA10 (ALT23) |
| | (ALT23) | |
| 27 | dCAS-ALPHA10 | Encoded protein CAS-ALPHA10 (ALT23). |
| | (ALT23) | A40G + E81G + A87K + T335R Cas-alpha endonuclease. Optimal at |
| | | 37C. |
| 28 | dCAS-ALPHA10 | Synthetic sequence encoding the Dead-CAS-ALPHA10 (dALT23) |
| | (ALT23) | |
| 29 | dCAS-ALPHA10 | Encoded protein Dead-CAS-ALPHA10 (dALT23). |
| | (ALT23) | A40G + E81G + A87K + T335R + D228A dCas-alpha endonuclease. |
| | | Optimal at 37C. |
| 30 | RV045092 | ZM1UBI PRO::dCAS-ALPHA10:CBF1a::UBI TERM |
| 31 | RV045093 | ZM1UBI PRO::dCAS-ALPHA10:CBF1a::UBI TERM |
| 32 | RV045094 | ZM1UBI PRO::dCAS-ALPHA10:CBF1a::UBI TERM |
| 33 | RV045095 | ZM1UBI PRO::dCAS-ALPHA10:CBF1a::UBI TERM |
| 34 | RV045096 | ZM1UBI PRO::dCAS-ALPHA10:CBF1a::UBI TERM |
| 35 | RV045097 | ZM1UBI PRO::dCAS-ALPHA10:CBF1a::UBI TERM |
| 36 | PHV00012 | U6 PRO::gRNAr1::U6 TERM |
| 37 | PHV00013 | U6 PRO::gRNAr2::U6 TERM |
| 38 | PHV00014 | U6 PRO::gRNAr3::U6 TERM |
| 39 | Cas-alpha10 variant | Engineered variant of Cas-alpha10 |
| 40 | CAS-ALPHA10 | Synthetic sequence encoding the CAS-ALPHA10 (ALT35) |
| | (ALT35) | |
| 41 | CAS-ALPHA10 | Encoded protein CAS-ALPHA10 (ALT35). |
| | (ALT35) | A40G + E81G + A87K + T335R + T190K + T217H + K298S + H306F + |
| | | I405N Cas-alpha endonuclease. Optimal at 30C and above. |
| 42 | PHV00015 | RB + 3xENH::PLTP PRO::WUS2 + NOS::CRC + UBI1ZM |
| | | PRO::KN1CPP: PROTEIN LINKER1: CAS-ALPHA10 (ALT 35) + |
| | | U6 PRO: gRNA-w1 + U6 PRO:gRNA-w2 + LB |
| 43 | Protein Linker1 | Nucleic acid sequence encoding Protein Linker1 |
| 44 | KN1CPP | Nucleic acid sequence encoding Knotted1 Cell Penetrating Peptide |
| 45 | CAS-ALPHA10 | Synthetic sequence CAS-ALPHA10 (ALT 30C-1) |
| | (ALT 30C-1) | |
| 46 | CAS-ALPHA10 | Synthetic sequence CAS-ALPHA10 (ALT 30C-2) |
| | (ALT 30C-2) | |
| 47 | CAS-ALPHA10 | Synthetic sequence CAS-ALPHA10 (ALT 30C-3) |
| | (ALT 30C-3) | |
| 48 | CAS-ALPHA10 | Synthetic sequence CAS-ALPHA10 (ALT 30C-4) |
| | (ALT 30C-4) | |
| 49 | CAS-ALPHA10 | Synthetic sequence CAS-ALPHA10 (ALT 30C-5) |
| | (ALT 30C-5) | |
| 50 | CAS-ALPHA10 | Synthetic sequence CAS-ALPHA10 (ALT 30C-6) |
| | (ALT 30C-6) | |
| 51 | CAS-ALPHA10 | Synthetic sequence CAS-ALPHA10 (ALT 30C-7) |
| | (ALT 30C-7) | |
| 52 | CAS-ALPHA10 | Synthetic sequence CAS-ALPHA10 (ALT 30C-8) |
| | (ALT 30C-8) | |
| 53 | CAS-ALPHA10 | Synthetic sequence CAS-ALPHA10 (ALT 30C-9) |
| | (ALT 30C-9) | |
| 54 | PHV00016 | RB + 3xENH::PLTP PRO::WUS2 + NOS::CRC + UBI1ZM |
| | | PRO::KN1CPP:PROTEIN LINKER1:CAS-ALPHA10 (ALT 4) + U6 |
| | | PRO: gRNA-w1 + U6 PRO:gRNA-w2 + NOS::CRC + LB |
| 55 | PHV00017 | RB + Hv-LTP2 PRO::CRC + UBI1ZM PRO::CAS-ALPHA10 (ALT |
| | | 4) + LB |
| 56 | PHV00018 | RB + 3xENH::PLTP PRO::WUS2 + U6 PRO: gRNA-w1 + U6 |
| | | PRO:gRNA-w2 + Si-UBI PRO::ZS-GREEN + LB |
| 57 | PHV00019 | RB + HSP17.7 PRO::WUS2 + UBI1ZM PRO::CAS-ALPHA10 (ALT |
| | | 4) + LTP2::CRC + LB |
| 58 | PHV00020 | RB + U6 PRO::gRNA-53.66 + CHR1-53.66 TARGET SITE::SEQ |
| | | 11-HR1:SI-UBI PRO::NPTII::SI_UBI TERM:SEQ12-HR2::CHR1- |
| | | 53.66 TARGET SITE + SB-UBI PRO::ZS-GREEN::SB-UBI TERM + |
| | | LB |
| 59 | CAS-ALPHA10 | Synthetic sequence encoding the CAS-ALPHA10 (ALT4) Exon2 |
| | EXON1 (MO1) | |
| 60 | CAS-ALPHA10 | Synthetic sequence encoding the CAS-ALPHA10 (ALT4) Exon2 |
| | EXON2 (MO1) | |
| | (TR1) (ALT4) | |
| 61 | CAS-ALPHA10 | Encoded protein CAS-ALPHA10 (ALT4). A40G + E81G + T335R Cas- |
| | (ALT4) | alpha endonuclease. Optimal at 37C |
| 62 | GRMZM2G028622- | WUS2 Genomic sequence from B73 |
| | WUS2genomic | |
| 63 | gRNA-a10-wus2-1 | gRNA1 for endogenous WUS2 promoter |
| 64 | gRNA-a10-wus2-2 | gRNA2 for endogenous WUS2 promoter |
| 65 | gRNA-a10-wus2-3 | gRNA3 for endogenous WUS2 promoter |
| 66 | gRNA-a10-wus2-4 | gRNA4 for endogenous WUS2 promoter |
| 67 | gRNA-a10-wus2-5 | gRNA5 for endogenous WUS2 promoter |
| 68 | gRNA-a10-wus2-6 | gRNA6 for endogenous WUS2 promoter |
| 69 | PVH00021 | RB + UBI1ZM PRO::dCAS9-ALPHA10:CBF1A::PINII TERM + U6 |
| | | PRO:gRNA-wus1 + U6 PRO:gRNA-wus2 + U6 PRO:gRNA-wus3 + + |
| | | U6 PRO:gRNA-bbm1 + U6 PRO:gRNA-bbm2 + U6 PRO:gRNA- |
| | | bbm3 + SB-UBI PRO::ZS-GREEN::OS-UBI TERM + LB |
| 70 | gRNA-a10-odp2-1 | gRNA1 for endogenous ODP2 promoter |
| 71 | gRNA-a10-odp2-2 | gRNA2 for endogenous ODP2 promoter |
| 72 | gRNA-a10-odp2-3 | gRNA3 for endogenous ODP2 promoter |
| 73 | gRNA-a10-odp2-4 | gRNA4 for endogenous ODP2 promoter |
| 74 | gRNA-a10-odp2-5 | gRNA5 for endogenous ODP2 promoter |
| 75 | gRNA-a10-odp2-6 | gRNA6 for endogenous ODP2 promoter |

### Example 2: Culture Media

[0199] Various media are referenced in the Examples for use in transformation and cell culture. These media are described below in Tables 2-9.

TABLE 2
Sorghum Transformation Media Compositions

PHI-I: 4.3 g/l MS salts (Phytotechnology Laboratories, Shawnee Mission, KS,
catalog number M524), 0.5 mg/l nicotinic acid, 0.5 mg/l pyridoxine HCl, 1 mg/l
thiamine HC1, 0.1 g/l myo-inositol, 1 g/l casamino acids (Becton Dickinson and
Company, BD Diagnostic Systems, Sparks, MD, catalog number 223050), 1.5 mg/l
2,4-dichlorophenoxyacetic acid (2,4-D), 68.5 g/l sucrose, 36 g/l glucose, pH 5.2;
with 100 μM acetosyringone added before using.
PHI-T: PHI-I with 20 g/l sucrose, 10 g/l glucose, 2 mg/l 2,4-D, no casamino acids,
0.5 g/l MES buffer, 0.7 g/l L-proline, 10 mg/l ascorbic acid, 100 μM
acetosyringone, 8 g/l agar, pH 5.8.
PHI-U: PHI-T with 1.5 mg/1 2,4-D 100 mg/l carbenicillin, 30 g/l sucrose, no glucose
and acetosyringone; 5 mg/l PPT(GLUFOSINATE-NH4), pH 5.8.
PHI-UM: PHI-U with12.5 g/l mannose and 5 g/l maltose, no sucrose, no
PPT(GLUFOSINATE-NH4), pH 5.8
PHI-V: PHI-U with 10 mg/l PPT(GLUFOSINATE-NH4)
DBC3: 4.3 g/l MS salts, 0.25 g/l myo-inositol, 1.0 g/l casein hydrolysate, 1.0 mg/l
thiamine HCL, 1.0 mg/l 2,4-D, 30 g/l maltose, 0.69 g/l L-proline, 1.22 mg/l cupric
sulfate, 0.5 mg/l BAP, 3.5 g/l phytagel, pH 5.8
PHI-X: 4.3 g/l MS salts, 0.1 g/l myo-inositol, 5.0 ml MS vitamins stockª, 0.5 mg/l
zeatin, 700 mg/l L-proline, 60 g/l sucrose, 1 mg/l indole-3-acetic acid, 0.1 μM
abscisic acid, 0.1 mg/l thidiazuron, 100 mg/l carbenicillin, 5 mg/l
PPT(GLUFOSINATE-NH4), 8 g/l agar, pH 5.6.
PHI-XM: PHI-X with no PPT(GLUFOSINATE-NH4); added 1.25 mg/l cupric
sulfate, pH 5.6.
PHI-Z: 2.15 g/l MS salts, 0.05 g/l myo-inositol, 2.5 ml MS vitamins stockª, 20 g/l
sucrose, 3 g/l phytagel, pH 5.6
^{a}MS vitamins stock: 0.1 g/l nicotinic acid, 0.1 g/l pyridoxine HCl, 0.02 g/l thiamine HCl, 0.4 g/l glycine

TABLE 3
WI 4
WI 4

| DI water | 1000 | mL |
|---|---|---|
| MS salt + Vitamins(M519) | 4.43 | g |
| Maltose | 30 | g |
| Glucose | 10 | g |
| MES | 1.95 | g |
| 2,4-D (.5 mg/L) | 1 | ml |
| Picloram (10 mg/ml) | 200 | μl |
| BAP (1 mg/L) | .5 | ml |
| Adjust PH to 5.8 with KOH | | |
| Post sterilization add: | | |
| Acetosyringone (400 μM) | 400 | μl |

TABLE 4
WC # 10
WC # 10

| DI water | 1000 | mL |
|---|---|---|
| MS salt + Vitamins(M519) | 4.43 | g |
| Maltose | 30 | g |
| Glucose | 1 | g |
| MES | 1.95 | g |
| 2,4-D (.5 mg/L) | 1 | ml |
| Picloram (10 mg/ml) | 200 | μl |
| BAP (1 mg/L) | .5 | ml |
| 50X CuSO4 (.1M) | 49 | μl |
| Adjust PH to 5.8 with KOH and add 2.5 g/L | | |
| of Phytagel. | | |
| Post sterilization add: | | |
| Acetosyringone (400 μM) | 400 | μl |

TABLE 5
DBC4
DBC4

| dd H20 | 1000 | mL |
|---|---|---|
| MS salt | 4.3 | g |
| Maltose | 30 | g |
| Myo-inositol | 0.25 | g |
| N-Z-Amine-A | 1 | g |
| Proline | 0.69 | g |
| Thiamine-HCl (0.1 mg/mL) | 10 | mL |
| 50X CuSO4 (0.1M) | 49 | μL |
| 2,4-D (0.5 mg/mL) | 2 | mL |
| BAP | 1 | mL |
| Adjust PH to 5.8 with KOH and then add | | |
| 3.5 g/L of Phytagel. | | |
| Post sterilization add: | | |
| Cef(100 mg/ml) | 1 | ml |

TABLE 6
DBC6
DBC6

| dd H20 | 1000 | mL |
|---|---|---|
| MS salt | 4.3 | g |
| Maltose | 30 | g |
| Myo-inositol | 0.25 | g |
| N-Z-Amine-A | 1 | g |
| Proline | 0.69 | g |
| Thiamine-HCl (0.1 mg/mL) | 10 | mL |
| 50X CuSO4 (0.1M) | 49 | μL |
| 2,4-D (0.5 mg/mL) | 1 | mL |
| BAP | 2 | mL |
| Adjust PH to 5.8 with KOH and then add | | |
| 3.5 g/L of Phytagel. | | |
| Post sterilization add: | | |
| Cef(100 mg/ml) | 1 | ml |

TABLE 7
MSA
MSA

| dd H20 | 1000 | mL |
|---|---|---|
| MS salt + Vitamins(M519) | 4.43 | g |
| Sucorse | 20 | g |
| Myo-Inositol | 1 | g |
| Adjust PH to 5.8 with KOH and then add | | |
| 3.5 g/L of Phytagel. | | |
| Post steriliaztion add: | | |
| Cef(100 mg/ml) | 1 | ml |

TABLE 8
MSB
MSB

| dd H20 | 1000 | mL |
|---|---|---|
| MS salt + Vitamins(M519) | 4.43 | g |
| Sucorse | 20 | g |
| Myo-Inositol | 1 | g |
| Adjust PH to 5.8 with KOH and then add | | |
| 3.5 g/L of Phytagel. | | |
| Post steriliaztion add: | | |
| Cef(100 mg/ml) | 1 | ml |
| IBA | .5 | ml |

TABLE 9
Media Compositions-

| | Units | | | | | | | |
|---|---|---|---|---|---|---|---|---|
| Medium components | per liter | 12V | 810I | 700 | 710I | 605J | 605T | 289Q |
| MS BASAL SALT | g | | | 4.3 | 4.3 | 4.3 | 4.3 | 4.3 |
| MIXTURE | | | | | | | | |
| N6 MACRONUTRIENTS | ml | | | | | 60.0 | 60.0 | |
| 10X | | | | | | | | |
| POTASSIUM NITRATE | g | | | | | 1.7 | 1.7 | |
| B5H MINOR SALTS | ml | | | | | 0.6 | 0.6 | |
| 1000X | | | | | | | | |
| NaFe EDTA FOR B5H | ml | | | | | 6.0 | 6.0 | |
| 100X | | | | | | | | |
| ERIKSSON'S VITAMINS | ml | | | | | 0.4 | 0.4 | |
| 1000X | | | | | | | | |
| S&H VITAMIN STOCK | ml | | | | | 6.0 | 6.0 | |
| 100X | | | | | | | | |
| THIAMINE .HCL | mg | | | 10.0 | 10.0 | 0.5 | 0.5 | |
| L-PROLINE | g | | | | 0.7 | 2.0 | 2.0 | 0.7 |
| CASEIN | g | | | | | 0.3 | 0.3 | |
| HYDROLYSATE (ACID) | | | | | | | | |
| SUCROSE | g | | | 68.5 | 20.0 | 20.0 | 20.0 | 60.0 |
| GLUCOSE | g | 5.0 | | 36.0 | 10.0 | 0.6 | 0.6 | |
| MALTOSE | g | | | | | | | |
| 2,4-D | mg | | | 1.5 | 2.0 | 0.8 | 0.8 | |
| AGAR | g | 15.0 | 15.0 | | 8.0 | 6.0 | 6.0 | 8.0 |
| PHYTAGEL | g | | | | | | | |
| DICAMBA | g | | | | | 1.2 | 1.2 | |
| SILVER NITRATE | mg | | | | | 3.4 | 3.4 | |
| AGRIBIO Carbenicillin | mg | | | | | 100 | | |
| Timentin | mg | | | | | | 150 | 150 |
| Cefotaxime | mg | | | | | | 100 | 100 |
| MYO-INOSITOL | g | | | 0.1 | 0.1 | | | 0.1 |
| NICOTINIC ACID | mg | | | 0.5 | 0.5 | | | |
| PYRIDOXINE.HCL | mg | | | 0.5 | 0.5 | | | |
| VITAMIN ASSAY | g | | | 1.0 | | | | |
| CASAMINO ACIDS | | | | | | | | |
| MES BUFFER | g | | | | 0.5 | | | |
| ACETOSYRINGONE | uM | | | | 100 | | | |
| ASCORBIC ACID | mg | | | | 10.0 | | | |
| 10 MG/ML (7S) | | | | | | | | |
| MS VITAMIN STOCK | ml | | | | | | | 5.0 |
| SOL. | | | | | | | | |
| ZEATIN | mg | | | | | | | 0.5 |
| CUPRIC SULFATE | mg | | | | | | | 1.3 |
| IAA 0.5 MG/ML (28A) | ml | | | | | | | 2.0 |
| ABA 0.1 mm | ml | | | | | | | 1.0 |
| THIDIAZURON | mg | | | | | | | 0.1 |
| AGRIBIO Carbenicillin | mg | | | | | | | 100.0 |
| PPT(GLUFOSINATE- | mg | | | | | | | |
| NH4) | | | | | | | | |
| BAP | mg | | | | | | | 1.0 |
| YEAST EXTRACT (BD | g | | 5.0 | | | | | |
| Difco) | | | | | | | | |
| PEPTONE | g | | 10.0 | | | | | |
| SODIUM CHLORIDE | g | | 5.0 | | | | | |
| SPECTINOMYCIN | mg | 50.0 | 100 | | | | | |
| FERROUS | ml | 2.0 | | | | | | |
| SULFATE.7H20 | | | | | | | | |
| AB BUFFER 20X (12D) | ml | 50.0 | | | | | | |
| AB SALTS 20X (12E) | ml | 50.0 | | | | | | |
| Benomyl | mg | | | | | | | |
| pH | | | | | | | | 5.6 |
| | Units | | | | | | | |
| Medium components | per liter | 289R | 13158H | 13224B | 13266K | 272X | 272V | 13158 |
| MS BASAL SALT | g | 4.3 | 4.3 | | 4.3 | 4.3 | 4.3 | 4.3 |
| MIXTURE | | | | | | | | |
| N6 MACRONUTRIENTS | ml | | | 4.0 | 60.0 | | | |
| 10X | | | | | | | | |
| POTASSIUM NITRATE | g | | | | 1.7 | | | |
| B5H MINOR SALTS | ml | | | | 0.6 | | | |
| 1000X | | | | | | | | |
| NaFe EDTA FOR B5H | ml | | | | 6.0 | | | |
| 100X | | | | | | | | |
| ERIKSSON'S VITAMINS | ml | | | 1.0 | 0.4 | | | |
| 1000X | | | | | | | | |
| S&H VITAMIN STOCK | ml | | | | 6.0 | | | |
| 100X | | | | | | | | |
| THIAMINE .HCL | mg | | | 0.5 | 0.5 | | | |
| L-PROLINE | g | 0.7 | 0.7 | 2.9 | 2.0 | | | |
| CASEIN | g | | | | 0.3 | | | |
| HYDROLYSATE (ACID) | | | | | | | | |
| SUCROSE | g | 60.0 | 60.0 | 190.0 | 20.0 | 40.0 | 40.0 | 40.0 |
| GLUCOSE | g | | | | 0.6 | | | |
| MALTOSE | g | | | | | | | |
| 2,4-D | mg | | | | 1.6 | | | |
| AGAR | g | | 8.0 | 6.4 | 6.0 | 6.0 | 6.0 | 6.0 |
| PHYTAGEL | g | | | | | | | |
| DICAMBA | g | | | | 1.2 | | | |
| SILVER NITRATE | mg | | | 8.5 | 1.7 | | | |
| AGRIBIO Carbenicillin | mg | | | | 2.0 | | | |
| Timentin | mg | 150 | 150 | | | | | |
| Cefotaxime | mg | 100 | 100 | 25 | 25 | | | |
| MYO-INOSITOL | g | 0.1 | 0.1 | | | 0.1 | 0.1 | 0.1 |
| NICOTINIC ACID | mg | | | | | | | |
| PYRIDOXINE.HCL | mg | | | | | | | |
| VITAMIN ASSAY | g | | | | | | | |
| CASAMINO ACIDS | | | | | | | | |
| MES BUFFER | g | | | | | | | |
| ACETOSYRINGONE | uM | | | | | | | |
| ASCORBIC ACID | mg | | | | | | | |
| 10MG/ML (7S) | | | | | | | | |
| MS VITAMIN STOCK | ml | 5.0 | 5.0 | | | 5.0 | 5.0 | 5.0 |
| SOL. | | | | | | | | |
| ZEATIN | mg | 0.5 | 0.5 | | | | | |
| CUPRIC SULFATE | mg | 1.3 | 1.3 | | | | | |
| IAA 0.5 MG/ML (28A) | ml | 2.0 | 2.0 | | | | | |
| ABA 0.1 mm | ml | 1.0 | 1.0 | | | | | |
| THIDIAZURON | mg | 0.1 | 0.1 | | | | | |
| AGRIBIO Carbenicillin | mg | | | | | | | |
| PPT(GLUFOSINATE- | mg | | | | | | | |
| NH4) | | | | | | | | |
| BAP | mg | | | | | | | |
| YEAST EXTRACT (BD | g | | | | | | | |
| Difco) | | | | | | | | |
| PEPTONE | g | | | | | | | |
| SODIUM CHLORIDE | g | | | | | | | |
| SPECTINOMYCIN | mg | | | | | | | |
| FERROUS | ml | | | | | | | |
| SULFATE.7H20 | | | | | | | | |
| AB BUFFER 20X (12D) | ml | | | | | | | |
| AB SALTS 20X (12E) | ml | | | | | | | |
| Benomyl | mg | | | | | | | 100.0 |
| pH | | | | | | 0.5 | 5.6 | |

### Example 3: Particle Bombardment

[0200] Standard protocols for particle bombardment (Finer and McMullen, 1991, In Vitro Cell Dev. Biol.—Plant 27:175-182) can be used with the methods of the disclosure.

[0201] A. Particle-Mediated Delivery for Cas9-Mediated Donor Template Integration Via Homology-Dependent Repair (Hdr)

[0202] Four plasmids were typically used for each particle bombardment; 1) the donor plasmid (50 ng/μl) containing the donor cassette flanked by homology-arms (genomic sequence) for CRISPR/Cas9-mediated homology-dependent SDN3, 2) a plasmid (50 ng/μl) containing the expression cassette UBI PRO::Cas9::pinII plus an expression cassette ZM-U6 PRO::gRNA::U6 TERM, 3) a plasmid (10 ng/μl) containing the expression cassette 3×ENH::UBI PRO::ODP2, and 4) a plasmid (5 ng/μl) containing the expression cassette NOS::WUS2::IN2 TERM. To attach the DNA to 0.6 μm gold particles, the four plasmids were mixed by adding 10 μl of each plasmid together in a low-binding microfuge tube (Sorenson Bioscience 39640T) for a total of 40 μl. To this suspension, 50 μl of 0.6 μm gold particles (30 μg/μl) and 1.0 μl of Transit 20/20 (Cat No MIR5404, Mirus Bio LLC) were added, and the suspension was placed on a rotary shaker for 10 minutes. The suspension was centrifuged at 10,000 RPM (˜9400×g) and the supernatant was discarded. The gold particles were re-suspended in 120 μl of 100% ethanol, briefly sonicated at low power and 10 μl was pipetted onto each carrier disc. The carrier discs were then air-dried to evaporate away all the remaining ethanol. Particle bombardment was performed using a PDF-1000/IE Particle Delivery Device, at 27 inches Hg using a 600 PSI rupture disc.

[0203] A transgenic Pioneer Stiff-Stalk inbred PHH5E was used in this experiment. Hemizygous seed was selected based on seed-specific expression of AM-CYAN1 and was surface sterilized using 80% ethanol for 3 minutes, followed by incubation in a solution of 50% bleach+0.1% Tween-20 while agitating with a stir-bar for 20 minutes. The sterile seed were then rinsed 3 times in sterile double-distilled water. Surface-sterilized seed were germinated on 13158F solid medium under (120 μE m-2 s-1) lights using an 18-hour photoperiod at 25° C.

[0204] Alternatively, chlorine gas or oxidizing agents can be used for seed sterilization. Chlorine gas can be generated using a variety of compounds (or agents), including bleaching powders, calcium hypochlorite, sodium hypochlorite, industrial bleach, household bleach, chlorine dioxide monochloramine, dichloramine, and trichloramine. Oxidizing agents that can be used in the method include but are not limited to, ozone, hydrogen peroxide, hypochlorous acid, hypobromous acid, chlorine dioxide, and ethylene dioxide.

[0205] After 14 days, the 3 cm segment directly above the seedling mesocotyl was excised (containing the leaf-whorl tissue directly above the apical meristem region of the stem). The 3 cm segment was bisected longitudinally using a scalpel. Then the outer layer of leaf tissue (coleoptile) was discarded. For the leaf tissue derived from each seedling, the leaves were separated and laid flat within a 2 cm diameter in the middle of a culture plate containing one of the two following media; i) medium 13224 containing 12% sucrose for 3-4 hr before bombardment (10 plates, each containing tissue from one of 10 seedlings and, ii) medium 13224C containing 12% sucrose+0.1 mg/l ethametsulfuron for 2-3 hours before bombardment (10 plates, each containing tissue from one of 10 seedlings).

[0206] Plasmids PHP21875 (SEQ ID NO: 4), PHP21139 (SEQ ID NO: 1), PHP71193 (SEQ ID NO: 76), and PHP71788 (SEQ ID NO: 77) were used. Preparation of DNA-functionalized gold particles was done as follows. Stock solutions of plasmids PHP71193 and PHP71788 (100 ng/μl) were diluted to 50 ng/μl with sterile water. Stock solutions of PHP21875 and PHP21139 (100 ng/μl) were diluted to 25 ng/μl with sterile water. Using sterile, low-binding Eppendorf tubes. Ten ul each of the diluted plasmids PHP71788 (50 ng/μl), PHP71193 (50 ng/μl), PHP21875 (25 ng/μl), and PHP21139 (25 ng/μl), were added to a sterile, low-binding Eppendorf tube (final ratio of plasmids was 50:50:25:25, respectively). This DNA mixture was then added to a sterile-low-binding Eppendorf tube containing 50 ul of 0.6 uM gold particles at a stock concentration of 10 mg/ml) and gently agitated to mix the DNA and gold in the suspension. One ul of Transit 20/20 was added and the tube again gently agitating. The tube was then placed on a 125 RPM rotator shaker for 10 minutes at room temperature. The tube was then centrifuged at 10,000 RPM in a microfuge. The supernatant was discarded and after adding 120 ul of 95% EtOH, the tube was sonicated briefly on a low setting to resuspend the particles and then 10 ul of the DNA/gold/EtOH suspension was pipetted onto the center of the carrier disc. The carrier discs were left exposed to the sterile air low in the laminar flow hood for approximately 10 minutes to evaporate the EtOH. The carrier discs with dried gold/DNA were then used for particle bombardment. For particle bombardment, a PDS-1000/He Particle Delivery System (Bio-rad, Hercules, CA, USA) was used, with 425 psi rupture disc, and the petri dish containing the target tissue positioned two shelves below the carrier-holder, and a vacuum of approximately 27 mg Hg.

[0207] When expression of Wus2 and Odp2 was induced by addition of ethametsulfuron, somatic embryogenesis was stimulated in leaf tissue. Using this inducible Wus2/Odp2 germplasm as the starting point for a new experiment, seedling-derived leaf tissue was then used as the target explant for particle bombardment. As mentioned above, in one treatment the leaf tissue was incubated on culture medium with 12% sucrose (to plasmolyze the leaf cells) prior to particle bombardment, and in the second treatment the leaf segments were exposed to culture medium with 12% sucrose plus 0.1 mg/l ethametsulfuron prior to particle delivery (providing an earlier exposure to the inductive treatment to begin stimulation of Wus2/Odp2 expression). To further enhance morphogenesis (beyond that provided by inducible expression), plasmids containing constitutive Wus2 and ODP2 expression cassettes were co-delivered with Cas9 and gRNA, as well as the template DNA (the genomic-sequence-flanked NPTII expression cassette). After DNA delivery, successful NPTII coding sequence integration via homology-dependent recombination (HDR) permitted regeneration of HDR events using both the inducing ligand (0.1 mg/l ethametsulfuron) and G418 for selection. Due to high levels of Wus2 and Bbm expression (inducible-expression from pre-integrated 60850-T-DNA plus constitutive expression provided by PHP21875 and PHP21139), selection using NPTII and G418 became less efficient, resulting in escape (wild type) plants being recovered. Thus, at lower levels of G418 selective agent (150 or 200 mg/l), when leaf tissue from 9 seedlings was used as starting explants for each treatment, 46 and 34 TO plants containing the NPTII gene were recovered but none were observed to contain perfect HDR integrations. In contrast, when 9 seedlings were again used for particle delivery of the plasmids followed by increased selective pressure due to higher G418 (250 mg/l), selection became more stringent and three perfect HDR integration events were recovered from a total of 38 TO plants that were regenerated and analyzed.

[0208] Thus, using this combination of Wus2 and Odp2 expression cassettes to stimulate growth while also delivering the SDN3 donor DNA, the Cas9 expression cassette, and the guide-RNA expression cassette resulted in efficient homology-dependent targeted integration. Thus, three perfect HDR events were recovered from particle bombardment of leaf segments derived from only 34 starting seedlings.

[0209] In comparison, when wild-type maize Stiff-Stalk inbred PHH5G was transformed in a similar manner but without the use of Wus2 and Odp2, transgenic events were not recovered. Thus, particle delivery of the plasmids PHP71193 and PHP71788 into seedling-derived leaf tissue (with no Wus2 or Odp2) does not result in transgenic or edited TO plants.

[0210] B. Site-Specific Integration

[0211] Pioneer inbred PH184C (disclosed in U.S. Pat. No. 8,445,763, incorporated herein by reference in its entirety) that contains in chromosome-1 a pre-integrated Site-Specific Integration (SSI) target site (Chrom-1 target site) composed of UBI PRO:FRT1:NPTII::PINII TERM+FRT87 is used. Prior to bombardment, 10-12 DAP (days after pollination) immature embryos are isolated from ears of Pioneer inbred PH184C and placed on 605J culture medium plus 16% sucrose for three hours to plasmolyze the scutellar cells. Alternatively, the first 2-3 cm of seedling-derived leaf-whorl tissue is bisected longitudinally and sliced into approximately 0.5-3.0 mm leaf segments, and these leaf segments are plasmolyzed on 605J medium plus 16% sucrose for three hours prior to particle bombardment.

[0212] Four plasmids are typically used for each particle bombardment:
[0213] 1) a donor plasmid (100 ng/μl) containing a FRT-flanked donor cassette for Recombinase-Mediated Cassette Exchange, for example a plasmid containing FRT1:PMI:: PINII TERM::CZ19B1 TERM+UBI1ZM PRO::UBI1ZM 5 UTR::UBI1ZM INTRON1::DS-RED2::PINII TERM+FRT6 (PHP8418-0004; SEQ ID NO: 78);
[0214] 2) a plasmid (2.5 ng/μl) containing the expression cassette UBI1ZM PRO::UBI1ZM 5 UTR::UBI1ZM INTRON1::FLPm::PINII TERM (PHP5096);
[0215] 3) a plasmid (10 ng/μl) containing the expression cassette ZM-PLTP PRO::ZM-ODP2::OS-T28 TERM+FMV & PCSV ENHANCERS (PHP89030); and
[0216] 4) a plasmid (5 ng/μl) containing the expression cassette ZM-PLTP PRO::ZM-WUS2::IN2-1 TERM+PSW1+GZ-W64A TERM+FL2 TERM (PHP89179).

[0217] To attach the DNA to 0.6 μm gold particles, the four plasmids are mixed by adding 10 μl of each plasmid together in a low-binding microfuge tube (Sorenson Bioscience 39640T) for a total of 40 μl. To this suspension, 50 μl of 0.6 μm gold particles (30 μg/μl) and 1.0 μl of Transit 20/20 (Cat No MIR5404, Mirus Bio LLC) are added, and the suspension is placed on a rotary shaker for 10 minutes. The suspension is centrifuged at 10,000 RPM (˜9400×g) and the supernatant is discarded. The gold particles are re-suspended in 120 μl of 100% ethanol, briefly sonicated at low power and 10 μl is pipetted onto each carrier disc. The carrier discs are then air-dried to remove all remaining ethanol. Particle bombardment is performed using a Biolistics PDF-1000, at 28 inches of Mercury using a 200 PSI rupture disc. After particle bombardment, the immature embryos or leaf segments are selected on 605J medium modified to contain 12.5 g/l mannose and 5 g/l maltose and no sucrose. After 10-12 weeks on selection, plantlets are regenerated and analyzed using qPCR. It is expected that co-delivery of PLTP::ODP2 (PHP89030) and PLTP::WUS2 (PHP89179) along with the SSI components (Donor DNA (PHP8418-0004)+UBI::FLP (PHP5096)) will produce high frequencies of site-specific integration of the donor fragment into the Chrom-1 target site (i.e. at rates of 4-7% relative to the number of bombarded immature embryos).

### Example 4: Agrobacterium-Mediated Transformation of Corn

[0218] A. Preparation of Agrobacterium Master Plate.

[0219] Agrobacterium tumefaciens harboring a binary donor vector was streaked out from a −80° C. frozen aliquot onto solid 12R medium and cultured at 28° C. in the dark for 2-3 days to make a master plate.

[0220] B. Growing Agrobacterium on Solid Medium.

[0221] A single colony or multiple colonies ofAgrobacterium were picked from the master plate and streaked onto a second plate containing 810K medium and incubated at 28° C. in the dark overnight.

[0222] Agrobacterium infection medium (700A; 5 ml) and 100 mM 3′-5′-Dimethoxy-4′-hydroxyacetophenone (acetosyringone; 5 μL) were added to a 14 mL conical tube in a hood. About 3 full loops of Agrobacterium from the second plate were suspended in the tube and the tube was then vortexed to make an even suspension. The suspension (1 ml) was transferred to a spectrophotometer tube and the optical density (550 nm) of the suspension was adjusted to a reading of about 0.35-1.0. The Agrobacterium concentration was approximately 0.5 to 2.0×10⁹ cfu/mL. The final Agrobacterium suspension was aliquoted into 2 mL microcentrifuge tubes, each containing about 1 mL of the suspension. The suspensions were then used as soon as possible.

[0223] C. Growing Agrobacterium on Liquid Medium.

[0224] Alternatively, Agrobacterium can be prepared for transformation by growing in liquid medium. One day before infection, a 125 ml flask was prepared with 30 ml of 557A medium (10.5 g/l potassium phosphate dibasic, 4.5 g/l potassium phosphate monobasic anhydrous, 1 g/l ammonium sulfate, 0.5 g/l sodium citrate dehydrate, 10 g/l sucrose, 1 mM magnesium sulfate) and 30 μL spectinomycin (50 mg/mL) and 30 μL acetosyringone (20 mg/mL). A half loopful of Agrobacterium from a second plate was suspended into the flasks and placed on an orbital shaker set at 200 rpm and incubated at 28° C. overnight. The Agrobacterium culture was centrifuged at 5000 rpm for 10 min. The supernatant was removed and the Agrobacterium infection medium (700A) with acetosyringone solution was added. The bacteria were resuspended by vortex and the optical density (550 nm) of the Agrobacterium suspension was adjusted to a reading of about 0.35 to 2.0.

[0225] D. Maize Transformation.

[0226] 1. Immature Embryo Transformation

[0227] Immature ears of a maize (Zea mays L.) cultivar were surface-sterilized for 15-20 min in 20% (v/v) bleach (5.25% sodium hypochlorite) plus 1 drop of Tween-20 followed by 3 washes in sterile water. Immature embryos (IEs) were isolated from ears and were placed in 2 ml of the Agrobacterium infection medium with acetosyringone solution. The optimal size of the embryos varies based on the inbred, but for transformation with WUS2 and ODP2 a wide size range of immature embryo sizes could be used. The solution was drawn off and 1 ml of Agrobacterium suspension was added to the embryos and the tube vortexed for 5-10 sec. The microfuge tube was allowed to stand for 5 min in the hood. The suspension of Agrobacterium and embryos were poured onto 7101 co-cultivation medium (see Table 9). Any embryos left in the tube were transferred to the plate using a sterile spatula. The Agrobacterium suspension was drawn off and the embryos placed axis side down on the media. The plate was sealed with Parafilm M® film (moisture resistant flexible plastic, available at Bemis Company, Inc., 1 Neenah Center 4th floor, PO Box 669, Neenah, WI 54957) and incubated in the dark at 21° C. for 1-3 days of co-cultivation.

[0228] Embryos were transferred to resting medium (605T medium) without selection. Three to 7 days later, they were transferred to maturation medium (289Q medium) supplemented with a selective agent.

[0229] 2. Seedling-Derived Leaf Tissue Transformation

[0230] Mature maize seed was surface sterilized for 15-20 min in 20% (v/v) bleach (5.25% sodium hypochlorite) plus 1 drop of Tween 20 followed by 3 washes in sterile water, germinated and allowed to grow into seedlings for approximately 14 days, and then prepared to produce leaf fragments as described above. Leaf segments were placed in the Agrobacterium infection medium (700A) with 200 μM acetosyringone solution+0.02% Break-Thru® surfactant (Plant Health Technologies, P.O. Box 70013, Boise, ID 83707-0113). The Agrobacterium infection medium was drawn off and 1 ml of the Agrobacterium suspension was added to the leaf segments and was allowed to stand for 20 min. The suspension of Agrobacterium and leaf segments were poured through a sterile metal sieve and the liquid was discarded. The leaf segments collected on the metal sieve were transferred using a spatula onto a stack of 3 sterile Whatman #2 filter papers, used to wick off excess Agrobacterium-containing liquid, and then again a spatula was used to transfer the leaf segments onto a filter paper lying on co-cultivation medium. The plate was incubated in the dark at 21° C. for 1-3 days of co-cultivation.

[0231] The filter papers supporting the leaf segments were then transferred to resting medium (605T medium) without selection. Seven days later, the filter papers supporting the leaf segments were transferred to selection medium for three weeks. After selection, healthy growing somatic embryos were transferred using forceps onto maturation medium for two weeks in the dark, at which point the maturation plates were transferred in toto (still containing the maturing somatic embryos) into the light for an addition week. After one week in the light, regenerating plantlets were transferred to rooting medium. After rooting, plantlets were ready for transplanting to the greenhouse.

[0232] 3. Transformation of Seedling-Derived Leaf Tissue in Maize Inbred PH85E with WUS2 and ODP2

[0233] Constitutive expression of WUS2 and ODP2 after Agrobacterium-mediated transformation of maize leaf segments resulted in production of embryogenic callus and/or rapidly formed somatic embryos which regenerate into healthy, fertile TO plants. The general protocol for Agrobacterium-mediated maize transformation described in Example above was used, with further detail on modifications below for using leaf tissue as the target explant.

[0234] In Vitro Seed Germination to Produce Seedling Target Tissue

[0235] Mature seeds of inbred PH85E were surface sterilized by immersion in a series of solutions under agitation using a magnetic stir bar; first in an 80% ethanol solution for 3 minutes, the ethanol solution was decanted and replaced with a 30% Clorox bleach solution containing 0.1% Tween-20 for 20 minutes, the Clorox bleach solution was decanted, and the mature seeds were rinsed (three 5-minute rinses) in autoclaved sterile water. The sterilized seeds were transferred onto solid 900 medium after the final sterile water rinse. In vitro germination and seedling growth were carried out at 26° C. with a 16 h light/8 h dark photoperiod. The first 2.5 to 3 cm of leaf whorl above the mesocotyl was removed from each 12-18 day-old seedling for further processing for transformation.

[0236] Alternatively, seeds may be sterilized by exposure to chlorine gas. Chlorine gas can be generated using a variety of compounds (or agents), including bleaching powders, calcium hypochlorite, sodium hypochlorite, industrial bleach, household bleach, chlorine dioxide monochloramine, dichloramine, and trichloramine. In addition, oxidizing agents can be used for seed sterilization. Oxidizing agents that can be used in the methods disclosed herein include but are not limited to, ozone, hydrogen peroxide, hypochlorous acid, hypobromous acid, chlorine dioxide, and ethylene dioxide.

[0237] Agrobacterium Preparation

[0238] Agrobacterium tumefaciens strain LBA4404 TD THY-harboring helper plasmid PHP71539 (SEQ ID NO: 4) (pVIR9, see US20190078106A1, herein incorporated by reference in its entirety) and a binary donor vector, PHP96037, containing a WUS2/ODP2 T-DNA with a selectable marker (ZM-ALS (HRA)) and a screenable marker (ZS-GREEN1) or a binary donor control vector containing a selectable marker and/or a screenable marker T-DNA (lacking WUS2/ODP2) was streaked out from a −80° C. frozen aliquot onto solid 12V medium and cultured at 28° C. in the dark for 2 days to make a master plate. A working plate was prepared by streaking 4-5 colonies from the 12V-grown master plate across fresh 810K media, incubating overnight in the dark at 28° C. prior to using for Agrobacterium infection. Additional helper plasmids (PHP70298, RV005393, and RV007497 (containing vir genes from A. rhizogenes)) useful in the methods of the disclosure are listed in Table 2.

[0239] Agrobacterium infection medium (700J medium, 10 ml) with the addition of 20 μL of acetosyringone and 20 μL of a previously 10-fold-diluted surfactant (Break Thru S 233, Evonik Industries GmbH, GoldschmidtstraBe 100, 45127 Essen, Germany) was added to a 50 mL conical tube in a hood. About 5 full loops of Agrobacterium were collected from the working plate, transferred to the infection medium in the 50 ml tube, and then vortexed until uniformly suspended. The suspension (1 ml) was transferred to a spectrophotometer tube and the optical density (550 nm) of the suspension was adjusted to a reading of 0.6. The final Agrobacterium suspension was aliquoted into Corning six-well plates containing 0.4 μm permeable culture inserts (Falcon, Part Numbers 353046 and 353090, respectively) with each well containing about 8 mL of the Agrobacterium suspension.

[0240] Seed of maize inbred PH85E were surface sterilized as previously described, and then germinated at 28° C. under low light on solid 90B medium (½ strength MS salts plus 20 g/l sucrose and 50 mg/l benomyl). The leaf base segment (an approximate 2.5-3.0 cm section above the mesocotyl) was removed from each 12-18 day-old in vitro-germinated seedling with sterilized scissors. These leaf segments were placed into a 150 mm×15 mm Petri dish. Forceps were used to hold each leaf whorl section at the upper green end and the section was bisected longitudinally into 2 lengthwise halves using a sterile #10 scalpel blade. The outer leaf was removed and the inner leaves of the whorl were then cross-cut (diced) into smaller sections (approximately 1 to 3 mm in size, preferably 2.5-3.0 mm in size). Small leaf sections were collected and directly transferred into the permeable culture inserts containing the Agrobacterium suspension and incubated at room temperature (25° C.) for a 15-minute infection period.

[0241] After infection, the culture insert containing the Agrobacterium-infected leaf segments was removed from the 8-well plate and placed on an autoclaved dry filter paper to wick up and remove any residual Agrobacterium solution. The infected leaf segments were then transferred onto a fresh filter paper (VWR 7.5 CM) resting on 710N solid co-cultivation medium. Forceps were used to evenly disperse the leaf segments on the 710N plates and to ensure they have enough room to grow. The infected leaf tissue was incubated at 21° C. in the dark for 2-3 days.

[0242] After 2-3d co-cultivation, the paper supporting the leaf tissue was removed from the 710N medium and transferred onto 605B medium for 4 week resting culture. Tissue was sub-cultured every 2 weeks. After the 4 weeks culture on resting medium (605B) the plates were placed into a controlled temperature/humidity incubator (45° C./70% RH) for a 2-hour heat treatment. The plates were removed from the incubator and kept at room temperature (25° C.) for 1-2 hours until the plates had cooled down. Depending on the maize inbred, a single two-hour heat treatment, or two 2-hour heat treatments on two consecutive days, were applied to stimulate the drought-inducible RAB17 promoter and induce CRE-mediated excision of WUS2, ODP2, and CRE recombinase.

[0243] After the heat treatment and temperature equilibration at room temperature, leaf segments with newly-developed somatic embryos were transferred onto 13329B maturation medium without filter papers, cultured in the dark at 28° C. for 2 weeks, and then moved into the a 26° C. light room for an additional week. Leaf segments that now supported small shoots were transferred onto 404J rooting medium for an additional 2-3 weeks until well formed roots had developed, at which point the plantlets were ready for transfer to the greenhouse.

[0244] Results from five experiments are shown in Table 15, in which 10 starting seedlings per experiment (50 total) were used to produce the starting leaf segments for Agrobacterium infection, the number of transgenic TO plants recovered ranged from 18 (Exp. 1) to 51 (Exp. 4), resulting in a mean transformation frequency of 360%+/−112 (Standard Deviation (SD)). This is in contrast to experiments in which only a selectable marker gene and/or a screenable marker gene (fluorescent protein gene) were contained in the T-DNA, in which no culture response was observed and no TO plants were produced.

[0245] In addition to a high transformation frequency, a high percentage of the recovered TO plants were single-copy (SC) for the T-DNA (containing the selectable marker and/or the screenable marker) with no contaminating sequences from Agrobacterium being detected. Such SC/No-Agro events (TO plants) ranged from 23% to 37% with a mean of 31.4% (+/−5.2% SD). By comparing the number of high-quality transgenic TO plants (SC for the T-DNA with no contaminating Agrobacterium backbone sequences) to the number of starting seedlings used in these experiments provided a clear measure of overall efficiency, with a mean frequency of 114% (+/−44% SD). This method using WUS2/ODP2 obviated the need for growing mature maize plants for 90-120 days in the greenhouse to produce immature embryo explants for transformation and provided transgenic events from leaf explants generated from germinated seed in the lab.

TABLE 15

| | | # of T0 | | # of SC | SC No- | SC No- | |
|---|---|---|---|---|---|---|---|
| | # of | plants | | No-Agro | Agro | Agro | Escape |
| Exp | Seedlings | (events) | T0 % | Seq | %* | %** | Freq. |
| 1 | 10 | 18 | 180% | 5 | 28% | 50% | 39% |
| 2 | 10 | 41 | 410% | 14 | 34% | 140% | 32% |
| 3 | 10 | 40 | 400% | 9 | 23% | 90% | 45% |
| 4 | 10 | 51 | 510% | 18 | 35% | 180% | 40% |
| 5 | 10 | 30 | 300% | 11 | 37% | 110% | 43% |
| | 50 | 180 | 360% | 57 | 29% | 114% | 39% |

*Frequency of T0 plants with single-copy T-DNA and no plasmid sequences, relative to the total number of T0 plants
**Frequency of T0 plants with single-copy T-DNA and no plasmid sequences, relative to the starting number of seedlings

### Example 5: Transformation of Sorghum Leaf Segments

[0246] Constitutive expression of WUS2 and ODP2 after Agrobacterium-mediated transformation of sorghum leaf segments results in production of embryogenic callus and/or rapidly formed somatic embryos which regenerate into healthy, fertile TO plants.

[0247] Agrobacterium strain, constructs, growth of seedlings, preparation of leaf material for transformation, Agrobacterium infection, co-culture, resting culture, maturation and rooting for sorghum were all the same as the methods developed for maize in Example 4. The purpose here was to determine how transferable the method was without any sorghum-specific optimization.

[0248] Results from four experiments using a WUS2/ODP2 T-DNA, along with one experiment in which the control T-DNA contained only a selectable marker and a fluorescent marker (HRA+ZS-GREEN) are shown in Table 16. Each experiment also contained a comparison between two resting media, 13266P (605B medium plus 50 mg/l meropenem) which contained no additional cupric sulfate or BAP and medium 13265L (13266P medium plus 100 uM cupric sulfate and 0.5 mg/l BAP).

[0249] As demonstrated for maize, sorghum treatments that contained WUS2 and ODP2 expression cassettes in the T-DNA (PHP96037) also resulted in high transformation frequencies, calculated based on the number oftransgenic TO plants recovered per starting seedling, with a mean (+/−SD) for 13266P and 13265L of 36.5 (+/−4.103) and 35.5% (+/−9.6) respectively, with no significant difference between the two media compositions (p=0.05). In contrast, the control treatment containing the selectable marker and/or the screenable marker with no WUS2/ODP2 in the T-DNA produced no transgenic events. The mean frequency of obtaining high-quality TO sorghum plants (single copy with no Agrobacterium backbone (SC/NA 0%)) when transformed with P1P96037 was between 367 to 38% for the two media.

[0250] As with maize, this method obviated the need for growing mature sorghum plants for 90-120 days in the greenhouse to produce immature embryos explants for transformation and provided transgenic events from leaf explants generated from germinated seed in the lab.

TABLE 16

| | | | | | # | | | |
|---|---|---|---|---|---|---|---|---|
| | | | | | SC/No | SC/ | | |
| | # | Treatment | # T0 | | Agro | NA | SC | # |
| Expt. No. | Seedlings | (Medium) | Plants | T0 % | (NA) | % | % | Escapes |
| 1 | 15 | 13265L | 65 | 433% | 26 | 40% | 30% | 2 |
| | 13 | 13266P | 18 | 138% | 7 | 39% | 7% | 2 |
| 2 | 15 | 13265L | 56 | 373% | 18 | 32% | 28% | 2 |
| | 15 | 13266P | 46 | 307% | 19 | 41% | 28% | 5 |
| 3 | 15 | 13265L | 32 | 213% | 7 | 22% | 7% | 0 |
| | 15 | 13266P | 14 | 93% | 5 | 36% | 13% | 0 |
| 4 | 16 | 13265L | 27 | 169% | 13 | 48% | 13% | 9 |
| | 16 | 13266P | 20 | 125% | 6 | 30% | 6% | 3 |
| Total | 61 | 13265L | 180 | 295% | 64 | 36% | 78% | 13 |
| Total | 59 | 13266P | 97 | 164% | 37 | 38% | 54% | 10 |
| No | 15 | 13265L | 0 | 0% | 0 | 0% | 0% | 0 |
| WUS/ODP2 | 15 | 13266P | 0 | 0% | 0 | 0% | 0% | 0 |
| Control | | | | | | | | |

### Example 6: Transformation of Cells with Two Rhizobiales Strains, One Comprising a Vector with an Integratable Polynucleotide and the Other Comprising a Vector with a Cas Endonuclease, Guide RNA, a Morphogenic Factor, and an Anti-Regeneration Gene

[0251] RV022904 (SEQ ID NO. 7) contained a donor sequence of HR arms (Homologous Recombination arms) flanking a UBIpro:NPTII, followed by a Ubipro:ZS-GREEN. RV022905 (SEQ ID NO. 8) contained triple enhancer PLTPpro:Wuschel, Ubipro:Cas9, a ZM U6 PolIII pro: gRNA cutting at TS45 in maize inbred ED85E, and a Nospro:CRC. Nospro:CRC inhibited regeneration if stably integrated by producing anthocyanin. Two strains of Agrobacterium tumefaciens, each harboring a binary donor RV022904 or RV022905 were struck out from a −80° C. frozen aliquot onto separate plates containing 810I medium and incubated for 1-2 days at 28° C. A single colony from each was picked and streaked out onto separate working plates and allowed to grow overnight at 28° C. The next morning in a sterile hood, the bacteria were individually scraped off and re-suspended in separate tubes of 14 ml infection media (700 medium; 5 ml) and 100 mM 3′-5′-Dimethoxy-4′-hydroxyacetophenone (acetosyringone; 5 μL) conical tube with a final OD of 0.1-0.2 at a wavelength of 550 nM. The Agrobacterium concentration was approximately 0.5 to 2.0×109 cfu/mL The Agrobacterium LBA4404 suspensions containing RV022904 and RV022905 were mixed in a 1:1 or 1:9 ratios with final volumes of 1 ml. In both cases, Agrobacterium containing RV022904 were the equal or larger volume. The suspensions were then used as soon as possible.

[0252] Ears of a maize (Zea mays L.) cultivar picked 11 days after pollination were surface-sterilized for 15-20 min in 20% (v/v) bleach (5.25% sodium hypochlorite) plus 1 drop of Tween 20 followed by 3 washes in sterile water. Immature embryos were isolated from ears and are placed in 2 ml of the infection medium with acetosyringone solution. Supernatant was removed and 1 ml of the Agro suspension was added to each tube of embryos. 500 embryos were transformed with the 1:1 ratio mix, and 500 embryos were transformed with the 1:9 ratio mix. A negative control 1:1 mix of RV022904 and RV022901 (SEQ ID NO. 9) (similar to RV022905 except not containing any guide RNA) was used to transform 200 embryos. After five minutes, embryos were removed, placed on solid co-cultivation medium plates, and oriented embryo axis down. Embryos were incubated at 21° C. in the dark for 1 day.

[0253] Embryos were then transferred to resting media and stored at 28C in the dark for 5-7 days. Tissues were then transferred to selection in the dark for 11-14 days.

[0254] At 7-12 days after Agrobacterium infection fluorescent multicellular structures were observed which continued to regenerate and produce plants. In contrast, multicellular structures containing anthocyanin did not regenerate.

[0255] Plantlets were moved to rooting with no selection for 7-14 days at 28° C. in the light. Leaves from individual plants were sampled for qRTPCR to confirm presence or absence of WUS and Cas9, and integration of UBIpro:NPTII at the SDN3 site. 27 Plantlets derived from the negative control Agro mix with no gRNA were sampled and tested for SDN3 frequency. None of the negative controls showed integration of UBIpro:NPTII at the cut site. 655 plantlets derived from the 1:1 Agrobacterium mix of RV022904 and RV022905 were sampled, of those 98 were escapes (negative for NPTII), 17 had low DNA, and 3 were PCR positive for both HR arms at the genomic cut site, demonstrating homology-dependent recombination (HDR). The overall HDR frequency of events was 0.54 percent. Of the positive SDN3 samples, all were PCR negative for presence WUS or Cas9 integration, indicating that the WUS and cas9 had acted transiently without integration.

[0256] About 456 plantlets derived from the 1:9 Agrobacterium mix of RV022904 and RV022905 were sampled. Of those, 147 were escapes and 24 had less DNA due to extraction differences. None of the samples yielded positive PCR for both HR arms at the genomic cut site, indicating no SDN3.

### Example 7: Transformation of Cells with Two Rhizobiales Strains, One Comprising a Vector with an Integratable Polynucleotide and a Guide RNA, and the Other Comprising a Vector with a Cas Endonuclease, Morphogenic Factor, and Anti-Regeneration Gene

[0257] RV022903 (SEQ ID NO. 10) contained a donor sequence of ZM U6 PolIII pro: gRNA cutting at TS45 in ED85E, HR arms flanking a UBIpro:NPTII, followed by a Ubipro:ZS-GREEN. RV022901 contained triple enhancer PLTPpro:Wuschel, Ubipro:Cas9, and a Nospro:CRC. Nospro:CRC inhibited regeneration if stably integrated by producing anthocyanin. As the guide RNA and Cas9 were split, cutting would only occur if both Agrobacteria transformed the same cell or if the guide RNA and/or Cas nuclease moves between cells (i.e., to another cell that was not directly transformed by the transformation process described herein to introduce the Cas enzyme, gRNA and/or the morphogenic factors). Two strains of Agrobacterium tumefaciens, each harboring a binary donor RV022901 or RV022903 were struck out from a −80° C. frozen aliquot onto separate plates containing 810I medium and incubated for 1-2 days at 28° C. A single colony from each was picked and streaked out onto separate working plates and allowed to grow overnight at 28° C. The next morning in a sterile hood, the bacteria were individually scraped off and re-suspended in separate tubes of 14 ml infection media (700 medium; 5 ml) and 100 mM 3′-5′-Dimethoxy-4′-hydroxyacetophenone (acetosyringone; 5 μL) conical tube with a final OD of 0.1-0.2 at a wavelength of 550 nM. The Agrobacterium concentration was approximately 0.5 to 2.0×10⁹ cfu/mL. The Agrobacterium LBA4404 suspensions containing RV022903 and RV022901 were mixed in a 1:1 or 1:9 ratios with final volumes of 1 ml. In both cases, Agrobacterium containing RV022903 were the equal or larger volume. The suspensions were then used as soon as possible.

[0258] Ears of a maize (Zea mays L.) cultivar picked 11 days after pollination were surface-sterilized for 15-20 min in 20% (v/v) bleach (5.25% sodium hypochlorite) plus 1 drop of Tween 20 followed by 3 washes in sterile water. Immature embryos were isolated from ears and are placed in 2 ml of the infection medium with acetosyringone solution. Supernatant was removed and 1 ml of the Agro suspension was added to each tube of embryos. 500 embryos were transformed with the 1:1 ratio mix, and 500 embryos were transformed with the 1:9 ratio mix. A negative control Agro mix not containing any guide RNA was used to transform 200 embryos. After five minutes, embryos were then removed and placed on solid co-cultivation medium plates and oriented embryo axis down. Embryos were incubated at 21° C. in the dark for 1 day.

[0259] Embryos were then transferred to resting media and stored at 28C in the dark for 5-7 days. Tissue were then transferred to selection in the dark for 11-14 days.

[0260] At 7-12 days after Agrobacterium infection fluorescent multicellular structures were observed which continued to develop and produce plants. In contrast, multicellular structures containing anthocyanin did not regenerate.

[0261] Plantlets were moved to rooting with no selection for 7-14 days at 28C in the light. Leafs from individual plants were sampled for qRTPCR to confirm presence or absence of WUS and Cas9, and integration of UBIpro:NPTII at the SDN3 site. 27 Plantlets derived from the negative control Agro mix with no gRNA were sampled and tested for SDN3 frequency. None of the negative controls showed integration of UBIpro:NPTII at the cut site. About 663 plantlets derived from the 1:1 Agrobacterium mix of RV022903 and RV022901 were sampled, of those 174 were escapes (negative for NPTII), 9 had low DNA, and 0 were PCR positive for both HR arms at the genomic cut site. About 472 plantlets derived from the 1:9 Agrobacterium mix of RV022903 and RV022901 were sampled, of those 147 were escapes (negative for NPTII), 8 had low DNA, and 2 were PCR positive for both HR arms at the genomic cut site, demonstrating homology-dependent recombination (HDR). The overall HDR frequency of events was 0.59 percent. Of the positive SDN3 samples, all were PCR negative for presence WUS or Cas9 integration, indicating that the WUS and Cas9 had acted transiently without integration.

### Example 8: Cutting Frequencies at 6 Days Post-Transformation

[0262] RV022903 contained a donor sequence of ZM U6 PolIII pro:gRNA cutting at TS45 in ED85E, HR arms flanking a UBIpro:NPTII, followed by a Ubipro:ZS-GREEN. RV022900 (SEQ ID NO. 11) contained triple enhancer PLTPpro:Wuschel:T2A:Cas9 (WUS and Cas9 linked by T2A (Liu et al. Sci Rep. 2017; 7(1):2193), and a Nospro:CRC. Nospro:CRC inhibited regeneration if stably integrated by producing anthocyanin. As the guide RNA and Cas9 were split, cutting would only occur if both agrobacteria transformed the same cell. Two strains of Agrobacterium tumefaciens, each harboring a binary donor RV022900 or RV022903 were struck out from a −80° C. frozen aliquot onto separate plates containing 810I medium and incubated for 1-2 days at 28° C. A single colony from each was picked and streaked out onto separate working plates and allowed to grow overnight at 28° C. The next morning in a sterile hood, the bacteria were individually scraped off and re-suspended in separate conical tubes of 14 ml infection media (700 medium; 5 ml) and 100 mM 3′-5′-Dimethoxy-4′-hydroxyacetophenone (acetosyringone; 5 μL) with a final OD of 0.4 at a wavelength of 550 nM. The Agrobacterium LBA4404 suspensions containing RV022903 and RV022900 were mixed in a 1:1 or 1:9 ratios with final volumes of lml. In both cases, Agrobacterium containing RV022903 were the equal or larger volume. The suspensions were then used as soon as possible.

[0263] Ears of a maize (Zea mays L.) cultivar picked 11 days after pollination were surface-sterilized for 15-20 min in 20% (v/v) bleach (5.25% sodium hypochlorite) plus 1 drop of Tween 20 followed by 3 washes in sterile water. Immature embryos were isolated from ears and are placed in 2 ml of the infection medium with acetosyringone solution. Supernatant was removed and 1 ml of the Agro suspension was added to each tube of embryos. 50 embryos were transformed with the 1:1 ratio mix, and 50 embryos were transformed with the 1:9 ratio mix. A negative control Agro mix not containing any guide RNA was used to transform 50 embryos. After five minutes, embryos were then removed and placed on solid co-cultivation medium plates and oriented embryo axis down. Embryos were incubated at 21° C. in the dark for 1 day.

[0264] Embryos were then transferred to resting media and stored at 28C in the dark for 5-7 days.

[0265] The above steps were also repeated for Agrobacterium containing RV022901 with RV022903, and RV022904 with RV022905. RV022905 alone was used as a positive control.

[0266] Immature embryos were collected and placed 20 per tube, frozen and lyophilized. After DNA extraction, cutting frequency was determined by PCR and sequencing over the TS45 cut site. Cut frequency was calculated as the number of sequence reads indicating a SNP or other polymorphism at TS45 divided by the total number of sequence reads. The average cut frequency for 40 embryos transformed with RV022900 with RV022903 at a 1:1 ratio was 0.62 percent, and 0.073 percent when transformed at a 1:9 ratio. The average cut frequency for 40 embryos transformed with RV022901 with RV022903 at a 1:1 ratio was 0.18, and 0.12 when transformed at a 1:9 ratio. RV022901 alone had a cut frequency of 0.01 percent. Positive control RV022905 alone had a cut frequency of 0.67 percent. The average cut frequency for 40 embryos transformed with RV022904 with RV022905 at a 1:1 ratio was 0.83 percent, and 0.28 percent when transformed at a 1:9 ratio.

TABLE 10
Cutting frequencies with different ratios of plasmids

| | Ratio/ | | Mutation |
|---|---|---|---|
| Replicate | Plasmid | Description | Frequency |
| A | 1:1 | RV022900:RV022903 | 0.03 |
| B | 1:1 00:03 | RV022900 & | 1.21 |
| | | RV022903 | |
| C | 1:9 00:03 | RV022900 & | 0.07 |
| | | RV022903 | |
| D | 1:9 00:03 | RV022900 & | 0.08 |
| | | RV022903 | |
| E | 01 Alone | neg control | 0.01 |
| F | 1:1 01:03 | RV022901 & | 0.18 |
| | | RV022903 | |
| G | 1:9 01:03 | RV022901 & | 0.12 |
| | | RV022903 | |
| H | 1:1 02:03 | RV022902 & | 0.00 |
| | | RV022903 | |
| I | 1:1 02:03 | RV022902 & | 0.02 |
| | | RV022903 | |
| J | 1:9 02:03 | RV022902 & | 0.00 |
| | | RV022903 | |
| K | 1:9 02:03 | RV022902 & | 0.00 |
| | | RV022903 | |
| L | 05 alone | positive control | 0.67 |
| | | RV022905 | |
| M | 1:1 05:04 | RV022905 & | 0.83 |
| | | RV022904 | |
| N | 1:9 05:04 | RV022905 & | 0.28 |
| | | RV022904 | |

### Example 9: Flanking Sites Added Outside of Hr Arms to Increase Sdn3 Frequency

[0267] P1TP34567 (SEQ ID NO. 12) contains a donor sequence of guide RNA cut sites outside of HR arms flanking a UBJpro:NPTII, followed by a Ubipro: Z S-GREEN. PLASMID E (RV022905) contains triple enhancer PLTPpro:Wuschel, Ubipro:Cas9, a ZM U6 Pol111 pro: gRNA cutting at TS45 in ED85E, and a Nospro:CRC. Nospro:CRC inhibits regeneration if stably integrated by producing anthocyanin. Two strains of Agrobacterium tumefaciens, each harboring a binary donor PHP34567 or RV022905 are struck out from a −80° C. frozen aliquot onto separate plates containing 810I medium and incubated for 1-2 days at 28° C. A control vector combination of vector RV022904, which does not contain gRNA cut sites flanking the donor sequence, and RV022905 is used as a control. A single colony from each is picked, struck out onto separate working plates, and allowed to grow overnight at 28° C. The next morning in a sterile hood, the bacteria are individually scraped off and re-suspended in separate conical tubes of 14 ml infection media (700 medium; 5 ml) and 100 mM 3′-5′-Dimethoxy-4′-hydroxyacetophenone (acetosyringone; 5 μL) in a conical tube with a final OD of 0.1-0.2 at a wavelength of 550 nM. The Agrobacterium concentration was approximately 0.5 to 2.0×109 cfu/mL The Agrobacterium LBA4404 suspensions containing PHP34567 and RV022905 are mixed in a 1:1 or 1:9 ratios with final volumes of 1 ml. In both cases, Agrobacterium containing PHP34567 are the equal or larger volume. The suspensions are then used as soon as possible.

[0268] Ears of a maize (Zea mays L.) cultivar picked 11 days after pollination are surface sterilized for 15-20 min in 20% (v/v) bleach (5.25% sodium hypochlorite) plus 1 drop of Tween 20 followed by 3 washes in sterile water. Immature embryos are isolated from ears and are placed in 2 ml of the infection medium with acetosyringone solution. Supernatant is removed and 1 ml of the Agrobacterium suspension is added to each tube of embryos. Embryos are transformed with the 1:1 ratio mix for both the control and experimental vector sets. Embryos are transformed with the 1:9 ratio mix for both the control and experimental vector sets. After five minutes, embryos are removed and placed on solid co-cultivation medium plates and oriented embryo axis down. Embryos are incubated at 21° C. in the dark for 1 day. During transformation using the experimental vector sets, Cas9 protein is activated and cuts at three locations: the two gRNA cut sites flanking the HR donor arms, and at the chromosomal/genomic cut site. This frees the donor segment of DNA and allows a higher frequency of HR integration into the genomic cut site.

[0269] Embryos are then transferred to resting media and stored at 28C in the dark for 5-7 days. Tissue are then transferred to selection in the dark for 11-14 days.

[0270] At 7-12 days after Agrobacterium infection fluorescent multicellular structures are observed which continue to develop and produce plants. In contrast, multicellular structures containing anthocyanin do not regenerate.

[0271] Plantlets are moved to rooting with no selection for 7-14 days at 28C in the light. Leafs from individual plants are sampled for qRTPCR to confirm presence or absence of WUS and Cas9, and integration of UBIpro:NPTII at the SDN3 site. Plantlets derived from the negative control Agro mix with no flanking gRNA cut sites are sampled and tested for SDN3 frequency. Some of the negative controls showed integration of UBIpro:NPTII at the cut site. Plantlets derived from the 1:1 Agrobacterium mix of PHP34567 and RV022905 are sampled. Of those, 4 times as many are positive for both HR arms at the genomic cut site, demonstrating homology-dependent recombination (HDR). Of the positive SDN3 samples, all are PCR negative for presence of WUS or Cas9 integration, indicating that the WUS and Cas9 acts transiently without integration. The overall HDR frequency is 4 times greater than the control configuration, which does not have flanking gRNA cut sites.

### Example 10: Co-Transformation Using One a Groba Cterium Containing a Helper Plasmid Plus Two Binary Plasmids, Each with its Own T-DNA. One Vector with a Low Copy Ori has T-DNA Encoding Non-Integrating Cas9 and Wus. The Second Vector with a Higher Copy Ori Contains T-DNA Encoding a Donor Template for Hdr

[0272] Co-transformation using one Agrobacterium containing the helper plasmid PHP71539 plus two binary plasmids, each with its own T-DNA. One vector with a low copy origin of replication has T-DNA encoding non-integrating Cas9, gRNA, WUS, and CRC. The second vector with a higher copy origin of replication contains T-DNA encoding a donor template for HDR. PHV00026 (SEQ ID NO. 13) contains a low copy number origin of replication repABC, a nopaline right border, triple enhancer PLTPpro:Wuschel, Ubipro:Cas9, a ZM U6 PolIII pro:gRNA cutting at TS45 in ED85E, and a Nospro:CRC, and an octopine left border. The succinamopine right border in an octopine strain could potentially yield fewer free T-strands created from the Agrobacterium (Sardesai et al. Transgenic Research 27, 539-550 (2018). The vector is in octopine strain LBA4404. A second vector PHV00027 (SEQ ID NO. 14) within the same Agrobacterium contains a pVS1 high copy number origin of replication, an octopine right border, and a donor sequence of HR arms flanking a UBIpro:NPTII, followed by a Ubipro:ZS-GREEN.

[0273] This strain ofAgrobacterium harboring PHP71539 plus both PHV00026 and PHV00027 plasmids is struck out from a −80° C. frozen aliquot onto a plate containing 810I medium and incubated for 1-2 days at 28° C. A single colony is picked, struck out onto a working plate, and allowed to grow overnight at 28° C. The next morning in a sterile hood, the bacteria are scraped off and re-suspended in a conical tube of 14 ml infection media (700 medium; 5 ml) and 100 mM 3′-5′-Dimethoxy-4′-hydroxyacetophenone (acetosyringone; 5 μL) with a final OD of 0.1-0.2 at a wavelength of 550 nM. The Agrobacterium LBA4404 suspension containing PHP71539, PHV00026, and PHV00027 are aliquoted to final volume of lml. The suspension is then used as soon as possible.

[0274] Ears of a maize (Zea mays L.) cultivar picked 11 days after pollination are surface-sterilized for 15-20 min in 20% (v/v) bleach (5.25% sodium hypochlorite) plus 1 drop of Tween 20 followed by 3 washes in sterile water. Immature embryos are isolated from ears and are placed in 2 ml of the infection medium with acetosyringone solution. Supernatant is removed and 1 ml of the Agro suspension is added to each tube of embryos. A negative control of an Agrobacterium containing similar vectors as outlined above, but not containing cassette for guide RNA is used to transform other embryos. After five minutes, embryos are removed and placed on solid co-cultivation medium plates and oriented embryo axis down. Embryos are incubated at 21° C. in the dark for 1 day. During transformation, two T-strands from the same Agro strain move into the plant cell. The vector with the lower origin of replication copy number and less efficient right border cutting has fewer T-strands produced. This T-strand contains Wus, Cas9, and CRC gene which will produce protein transiently in the transformed plant cell. Cas9 protein is activated and cuts at the chromosomal/genomic cut site, as well as on the gRNA cut sites flanking the HR arms on the second T-Strand, releasing the donor fragment for SDN3.

[0275] Embryos are then transferred to resting media and stored at 28° C. in the dark for 5-7 days. Tissue are then transferred to selection in the dark for 11-14 days.

[0276] At 7-12 days after Agrobacterium infection, fluorescent multicellular structures are observed which continue to develop and produce plants. In contrast, multicellular structures containing anthocyanin do not regenerate.

[0277] Plantlets are moved to rooting with no selection for 7-14 days at 28C in the light. Leaves from individual plants are sampled for qRTPCR to confirm presence or absence of WUS and Cas9, and integration of UBIpro:NPTII at the SDN3 site. 50 Plantlets derived from the negative control agro mix with no gRNA are sampled and tested for SDN3 frequency. None of the negative controls showed integration of UBIpro:NPTII at the cut site. Plantlets derived from the Agrobacterium containing are sampled. Of those, some are PCR positive for both HR arms at the genomic cut site, demonstrating homology-dependent recombination (HDR). Of the positive SDN3 samples, all are PCR negative for presence WUS or Cas9 integration, indicating that the WUS and Cas9 acts transiently without integration.

### Example 11: Sugarcane Inner Whorl Transient Cas9 Activity and Regeneration

[0278] A plasmid is used that contains a T-DNA with a 3×ENH::UBI PRO:ZM-WUS2+NOS PRO::CRC+UBI PRO::CAS9, +ZM-U6 PRO, +ALS-MUT1, where the gRNA directs cutting to the endogenous ALS2 gene, the ALS-MUT1 sequence provides a template for editing the endogenous ALS sequence, and the CRC gene inhibits regeneration if stably integrated by producing anthocyanin. The genomic cut site within the ALS gene in conjunction with the ALS-MUT1 editing template provide the components for altering a single base within the endogenous ALS gene, which would confer resistance to the sulfonylurea herbicide chlorsulfuron.

[0279] Sugarcane tops are harvested from cultivar CP 88-1762 when six to eight nodes are visible. The outermost leaf sheaths are sterilized 70% ethanol foam and removed under sterile conditions. Immature leaf whorl cross-sections of 2-3 mm thickness are cut from a 0.1 to 5-cm region above the apical meristem. 500 of these segments are co-cultivated with either LBA4404 or AGL1 containing PHPsugar for three days in the dark at 24° C.

[0280] Co-cultivated inner whorl segments are incubated for 3 days in the dark at 28° C. on direct embryogenesis medium. During this co-cultivation, T-DNA transiently moves into the nucleus of many cells, and transient expression of gRNA, Cas9, and wuschel occurs. Wuschel gives a boost to embryogenesis while Cas9/gRNA cut at a specific target site within the endogenous ALS gene. If stable integration of the T-DNA occurs, then the cell will not regenerate due to presence of CRCand WUS2. After 7 days, segments are transferred to direct embryogenesis media containing 150 uM chlrosulfuron. After embryogenic shoots start to emerge, the segments are transferred to light at 30 μmol m-2 s-1 with 16 h:8-h (light/dark) photoperiod at 28° C. Somatic embryos are observed between 14-21 days after transformation. Germination of somatic embryos initiate between 30 days after agro co-cultivation. Gene edited shoots, many of which are conferring resistance to chlorsulfuron emerge after 5 weeks and are transferred to rooting media. Shoots are analyzed from both LBA4404 co-cultivated cuttings, and AGL1 co-cultivated cuttings. Of the segments co-cultivated with LBA4404 a number of shoots emerge, and some are positive for edits at the ALS gene. Of these, most or all are negative for presence of the Wuschel, Cas9, and/or guide RNA genes.

### Example 12: Transient Expression for Gene Editing in Dicot Explants

[0281] Two Agrobacterium strains are used. The first Agrobacterium strain LBA4404 THY-harboring a T-DNA with a WUS expression cassette, a Cas9 expression cassette, gRNA expression cassette, and a gene expression cassette conferring anti-regeneration if stably expressed, is used. The second Agrobacterium strain contains a gene of interest (trait) and a selectable marker expression cassette. The two Agrobacterium strains are used to co-transform segments of tissue cut from in vitro-grown, sterile, immature soybean explants. Agrobacterium methods, transformation and media progression through co-cultivation and shoot elongation are as previously described.

[0282] Soybean lines such as elite lines, including, but not limited to, 93Y21 can be used in this process. Soy tissue explants are harvested and are cut into 3-8 mm sections. An Agrobacterium strain containing the vectors described above are used for the infections, and all bacterial cultures are adjusted to OD550 of 0.5 for infection. All vectors contain the selectable marker gene SPCN (spectinomycin). Explants are infected for 30 min and are placed on co-cultivation medium for three days at 21° C. in dark. After co-cultivation, explants are transferred to shoot regeneration medium. Infection frequency is evaluated by screening the transient expression of the selectable marker gene at 5 and 20 days after transformation. Transient expression of Cas9, gRNA, Wuschel (WUS), and a anti-regeneration gene occur from the first Agrobacterium T-DNA. Transient expression of Cas9 and gRNA create a cut in a specific genomic location/locus. Transient expression of Wuschel can induce cell division. If stable integration of this T-strand occurs, the cell will not divide or regenerate. Integration of a donor DNA carrying a selectable marker from the second T-DNA occurs at the genomic locus cut site. Shoot regeneration is observed about 20 days after infection. In addition, transgenic shoots are evaluated for the presence of the marker gene and absence of Wuschel and Cas9 genes.

[0283] Plantlets are moved to rooting with no selection for 1-2 weelks in the light. Leaves from individual plants are sampled for qRTPCR to confirm presence or absence of WUS and Cas9, and integration of selectable marker at the SDN3 site. Of the positive SDN3 samples, all are PCR negative for presence of WUS or Cas9 integration, indicating that the WUS and Cas9 acts transiently without integration. It is believed this editing method will work for other commercially important dicots.

### Example 13: Restoring Function to a Non-Functional Gene Product Via Non-Integrated Guided Cas Systems

[0284] As demonstrated in Patent Application US20180282763A1 (incorporated in its entirety here as reference), a disrupted mutant of a chlorsulfuron-resistant ALS allele in maize can be restored through repair of double-stranded breaks generated by Cas9-gRNA cutting in maize. Specifically, the ALS2-P165S gene conferring resistance to chlorsulfuron was further modified (resulting in a disrupted gene): the proline codon encoded by CCG (amino acid 165) in the ALSCas-7 target site was altered by removal of the G nucleotide at the wobble position (3rd nucleotide position in the codon) resulting in the translational frameshift and a disrupted gene (referred to as ALS2-P165S-CCA).

[0285] Double-Stranded Breaks (DSB) generated by the Cas9-gRNA system in maize are repaired predominantly through NHEJ often resulting in a single nucleotide insertion at the cleavage site. Due to the fact that proline is encoded by all four of the possible nucleotide insertions at the 3rd wobble position (CCA, CCG, CCT, and CCC) at roughly similar frequencies in maize, any of the four nucleotides being inserted at this position will functionally restore resistance to chlorsulfuron.

[0286] As described in patent application U.S. Ser. No. 10/934,536(B2), maize plants (Hi-II genotype) with the specifically-modified the ALS2 gene described above were generated, creating the ALSCas-7 target site that conferred resistance to chlorsulfuron. Then a second round of Cas9/gRNA editing was used to remove the third base in the underlined codon above (removing the “G” from the CCG codon) to produce a frameshift mutant that did not produce a functional protein to confer resistance (this new allele was referred to as ALS2-P165S-CCΔ).

[0287] The resultant germplasm containing the disrupted chlorsulfuron-resistant ALS gene (ALS2-P165S-CCΔ) can then be used for retransformation with Cas9 and an appropriate gRNA (ZM-ALS-CR7-1) that result in targeted cutting and insertion of a nucleotide at the cut-site through NHEJ, replacing the missing “G” in the codon and restoring chlorsulfuron resistance. In this manner, Cas9-mediated restoration of this disrupted gene can be used as a selection marker for events which have undergone Cas9-mediated editing. When performed in conjunction with another (unrelated) CAS-mediated genome edit using gRNAs for other genomic sequences/locations, selection using the restored ALS mutant gene enriches the population of TO plants for the second edit.

[0288] A. Using One Agrobacterium to Deliver Wus/Cas, and a Second Agrobacterium to Deliver Grna Expression Cassettes for Genome Edits.

[0289] A mixture of two Agrobacteria is used the first Agrobacterium containing a T-DNA with expression cassettes for WUS2, ODP2, CAS9, and ZS-GREEN (for example, see PHV00022 in Table 2 for detailed description), and the second Agrobacterium containing a T-DNA with two gRNA expression cassettes that will target cutting in the endogenous maize WAXY locus, plus the gRNA ZM-ALS-CR7-1, and the fluorescent marker DS-RED2 (PHP00024).

[0290] Specifically, the first Agrobacterium strain LBA4404 THY-TN- contains both the virulence-promoting helper plasmid (PHP71539; SEQ ID NO. 39) plus the T-DNA-containing plasmid PHV00022 (Table 2 and SEQ ID NO. 15) with the T-DNA containing LOXP +NOS::WUS2+3×ENH::UBI::ODP2+HSP::CRE+LOXP+UBI::CAS9+UBI::ZS-GREEN. The second Agrobacterium contains both PHP71539 plus a T-DNA-containing plasmid PHV00024 (Table 2 and SEQ ID NO. 17) with a T-DNA containing U6::w1 gRNA+U6::w2 gRNA+U6::ALS-CR7 gRNA+UBI::DS-RED2. The two Agrobacterium are grown overnight on solid medium and suspended in infection medium adjusted to the appropriate concentration (OD=0.5-0.6 at 550 nm) as described in EXAMPLE 4. The two Agrobacterium suspensions are then mixed at a 1:1 ratio, and the mixed Agrobacterium suspension is used for seedling-derived leaf transformation of inbred PHH5E, as described in EXAMPLE 4. After the one-week co-cultivation period, the transformed leaf segments are transferred onto chlorsulfuron-containing medium and after 3-4 weeks on selection, healthy somatic embryos are transferred onto maturation medium, then onto rooting medium and finally healthy TO plantlets are transferred to soil in the greenhouse. Using this method, it is expected that a high frequency of TO plants exhibiting resistance to the chlorsulfuron herbicide are recovered, and upon molecular analysis it is determined that a high frequency of the TO plants contain both the restored ALS allele that confers resistance to chlorsulfuron, and dropout of the WAXY gene.

[0291] A cut and edit at the ALS gene will confer resistance to the herbicide chlorsulfuron or ethametsulfuron. Although restoration of ALS has been used as an exemplary locus, one could use restoration of function or induction of function of any locus whether it is an endogenous locus or transgenic locus for gene function for positive selection. Agrobacterium methods, transformation and media progression through co-cultivation and shoot elongation are as previously described. Edits at the ALS gene to now confer resistance to chlorsulfuron. Edits to a second trait can also be made, utilizing the other gRNAs.

[0292] Plantlets are moved to rooting media for 7-14 days at 28° C. in the light. Leaves from individual plants are sampled for PCR to confirm presence or absence of WUS, ODP2 and Cas9, and base pair editing at the ALS locus. Some plants have an edit conferring resistance at the ALS edited locus and a second trait locus. All are PCR negative for presence WUS, ODP2, or Cas9 integration, indicating that these genes act transiently without integration. Plantlets derived from the negative control agro with no gRNA are sampled and tested editing frequency. None of the negative control plants show editing at the ALS/edited locus.

[0293] Based on the results described herein, one skilled in the art can use and expand the described approach to any similarly modified endogenous or pre-integrated exogenous gene(s) replacing co-delivery of a selectable marker gene currently used in plant genome editing experiments. Likewise, this strategy of restoring ALS resistance can be readily adapted to use alternative nucleases to CAS9, such as CAS-alpha10 (see WO2020123887 published 18 Jun. 2020 U.S. Ser. No. 10/934,536(B2)_RTS21920B—US-NP), or such diverse alternative nuclease system such as meganucleases, zinc-finger nucleases, or TALENs.

[0294] B. Using a Single Agrobacterium to Deliver a T-DNA Containing Wus/Odp2/Cas9 and Grna for Transient Edits.

[0295] An Agrobacterium strain LBA4404 THY-TN- contains both the virulence-promoting helper plasmid (PHP71539; SEQ ID NO. 39) plus the T-DNA-containing plasmid PHV00023 (Table 2 and SEQ ID NO. 16) with the T-DNA containing LOXP+NOS::WUS2+3×ENH::UBI::ODP2+HSP::CRE+LOXP+UBI::CAS9+U6::w1 gRNA+U6::w2 gRNA+U6::ALS-CR7 gRNA+UBI::ZS-GREEN.

[0296] The Agrobacterium is grown overnight on solid medium and suspended in infection medium adjusted to the appropriate concentration (OD=0.5-0.6 at 550 nm) as described in EXAMPLE 4, and then used for seedling-derived leaf transformation of inbred PHH5E, as described in EXAMPLE 4. After the one-week co-cultivation period, the transformed leaf segments are transferred onto chlorsulfuron-containing medium and after 3-4 weeks on selection, healthy somatic embryos are transferred onto maturation medium, then onto rooting medium and finally healthy TO plantlets are transferred to soil in the greenhouse. Using this method, it is expected that a high frequency of TO plants exhibiting resistance to the chlorsulfuron herbicide are recovered, and upon molecular analysis it is determined that a high frequency of the TO plants contain both the restored ALS allele that confers resistance to chlorsulfuron, and dropout of the WAXY gene.

[0297] A cut and edit at the ALS gene will confer resistance to the herbicide chlorsulfuron or ethametsulfuron. Although restoration of ALS has been used as an exemplary locus, one could use restoration of function or induction of function of any locus whether it is an endogenous locus or transgenic locus for gene function for positive selection. Agrobacterium methods, transformation and media progression through co-cultivation and shoot elongation are as previously described. Edits at the ALS gene now confer resistance to chlorsulfuron. Edits to a second trait can also be made, utilizing the other gRNAs.

[0298] Plantlets are moved to rooting media for 7-14 days at 28° C. in the light. Leaves from individual plants are sampled for PCR to confirm presence or absence of WUS, ODP2, and Cas9, and base pair editing at the ALS locus. Some plants have an edit conferring resistance at the ALS edited locus and a second trait locus. All are PCR negative for presence WUS, ODP2, or Cas9 integration, indicating that these genes act transiently without integration. Plantlets derived from the negative control Agrobacterium with no gRNA are sampled and tested editing frequency. None of the negative control plants show editing at the ALS/edited locus.

[0299] Based on the results described herein, one skilled in the art can use and expand the described approach to any similarly modified endogenous or pre-integrated exogenous gene(s) replacing co-delivery of a selectable marker gene currently used in plant genome editing experiments. Likewise, this strategy of restoring ALS resistance can be readily adapted to use alternative nucleases to CAS9, such as CAS-alpha10 (Patent Application BB2533PCT (need US Patent No. here, incorporated in its entirety here as reference), or such diverse alternative nuclease system such as meganucleases, zinc-finger nucleases, or TALENs.

### Example 14: Using Agrobacterium to Transform One Cell, but Cas-Alpha or Other Small Cas Endonucleases and Morphogenic Gene Proteins Move to Neighboring Cell(s) to Promote Gene Editing and Regeneration

[0300] In another example, any of the methods described herein may benefit from the usage of a smaller endonuclease, such as Cas-alpha (see WO2020123887 published 18 Jun. 2020 U.S. Ser. No. 10/934,536(B2)_RTS21920B—US-NP).

### Example 15: Expressing a Fusion of Dcas to a Cbf1a Activation Domain, Targeted to the R Promoter to Activate Anthocyanin Production

[0301] a. CBF1A Activation Domain

[0302] Two component transactivation expression systems have been used for many years in plants, for example, see Schwechheiner et al., 1998, Plant Mol. Biol. 36:195-204, in which a fusion protein consisting of the GAL4 DNA-binding domain and the herpes simplex virus PV16 activation domain is expressed behind a promoter such as CaMV 35S, which binds to upstream activation sequences (UAS) in front of a minimal −45 CaMV promoter and the reporter gene beta-glucuronidase. GAL4 UAS is methylated in plants which inhibits binding (Galweiler et al., 2000, Plant J. 23:143-157). As an alternative to GAL4˜VP16, the use of alternative DNA-binding domains such as dCAS9 fused to plant activation domains make a good alternative for two component expression in plants. One such plant transcriptional activation domain comes from the Arabidopsis CBF1A protein (Stockinger et al., 1997, PNAS 94:1035-1040; Wang et al., 2005, Plant Mol. Biol. 58:543-559). For these experiments, the activation domain of the Arabidopsis thaliana CBF1A protein was used (SEQ ID NO. 18).

[0303] b. Expression of the control plasmid CRC (or the separate C1 and R genes) produces the phenotype of anthocyanin accumulation in maize cells (Ludwig, S. et al. (1990) Science. 247, 449-450 and Grotewold, E. et al. (2000) Proc Natl Acad Sci USA. 97, 13579-13584).

[0304] The fusion protein CRC is composed of the two major domains of the maize C1 transcription factor, the C1-myb domain which binds it's cognate promoter binding sites in target genomic genes (triggering expression of many other genes in the anthocyanin pathway) and the C1 activation domain which stimulates transcription of the targeted genes. These two C1 domains were fused with the maize R gene (a second complementary transcription factor in the anthocyanin pathway) intervening between the two C1 domains, to form the CRC fusion protein (see Bruce et al, 2000, Plant Cell 12(1):65-80). When a construct containing NOS PRO::CRC::SB-GKAF TERM (PHP86489; SEQ ID NO. 20) was introduced into scutellar cells of maize immature embryos using particle bombardment or via Agrobacterium, visible anthocyanin pigment (which accumulates in vacuoles within the expressing cells) was observed starting at 1-4 days after transformation. In a similar manner, when constitutive promoters are used to drive expression of C1 and R in two separate expression cassettes, anthocyanin accumulation is also observed.

[0305] c. Expression of C1 alone is insufficient to produce anthocyanin (see Young, J. et al. (2019) Commun Biol. 2, 383).

[0306] As a control, particle bombardment is used to introduce the expression cassette CAMV35S ENH::PRO::C1::PINII TERM (PHP665; SEQ ID NO. 21) into scutellar cells of immature embryos, and no anthocyanin is observed. After 1-2 days post-bombardment, and even after weeks of culture, no anthocyanin was observed.

[0307] a. As described in Young, J. et al. 2019, Expression of dCAS9:CBF1A+U6 PRO:gRNAr1+U6 PRO:gRNAr2+U6 PRO:gRNAr3+CAMV35S::C1 result in anthocyanin accumulation.

[0308] Briefly, plasmids containing a constitutively expressed dCAS9:CBF1A fusion protein (PV225; SEQ ID NO. 22), multiple constitutively expressed gRNA sequences that target the endogenous R promoter (PV521, PV523 and PV528; SEQ ID NO. 23, 24, and 25, respectively), plus a constitutively expressed maize C1 gene (PHP665), were introduced into maize immature embryos. The particle gun was used to introduce UBI PRO::dCAS9:CBF1A::PINII TERM+U6 PRO:gRNAr1+U6 PRO:GRNAr2+U6 PRO:gRNAr3+CAMV35S::C1. One to four days after particle delivery, anthocyanin accumulation was observed in scutellar cells of the infected immature embryos.

[0309] In a similar manner, dCASa10 can be fused to repressor motifs or epigenome-modifying factors such as histone deacylase inhibitors (Gilbert et al., 2013, Cell 154(2):442-51), or to CBF300-type proteins (histone acetyltransferase) which locally activate endogenous gene expression (Cheng et al., 2016, Cell Res 26, 254-257).

### Example 16: Expressing a Fusion of Dcas-Alpha10 to a Maize-Optimized Cbf1a Activation Domain, Targeted to the R Promoter to Activate Anthocyanin Production

[0310] In this example, the anthocyanin pigmentation pathway in Zea mays cells was activated. Since the coordinated action of two transcription factors, R and C1, are needed to stimulate the production of anthocyanin resulting in a red cellular phenotype (Grotewold et al. (2000) Proceedings of the National Academy of Sciences of the United States of America. 97, 13579-13584), the r gene was targeted for transcriptional upregulation with Cas-alpha while the cl gene was overexpressed from a transgenic construct similar to that described earlier using components of Cas9 or type I-E CRISPR systems (Young et al. (2019) Communications Biology. 2, 383).

[0311] A Cas-alpha nuclease expression construct was first engineered to encode a Cas-alpha protein capable of target binding and gene activation. As an example, see FIG. 1 where the A40G+E81G+A87K+T335R (SEQ ID NO: 26) Cas-alpha 10 variant was converted to a nuclease inactive or dead (d) Cas-alpha 10 (SEQ ID NO: 28) and linked with the transcriptional activation domain from the CBF1 protein (SEQ ID NO: 18) using a sequence encoding a flexible connecting peptide (SEQ ID NO: 43). To test the effect of the CBF1 fusion on Cas-alpha 10 dimerization, target recognition and subsequent gene activation, a second Cas-alpha 10 expression construct without the CBF1 domain was also engineered (FIG. 2). Three targets were next selected in the r gene promoter region and sgRNA expression constructs produced. The resulting expression constructs were then co-delivered along with the C1 overexpression cassette into immature corn embryos using particle mediated biolistic transformation as described in EXAMPLE 3. Initially, two experiments were performed. The first experiment used only the CBF1 linked dCas-alpha 10 (FIG. 1) and sgRNA expression cassettes while the second was assembled using a 1:4 mixture of unlinked (FIG. 2) and CBF1 linked dCas-alpha 10 (FIG. 1) expression plasmids along with the sgRNA constructs. After transformation, embryos were exposed to 37° C. for 3 days following transformation as shown in FIG. 3, regimen 2. Four days after transformation, a red anthocyanin phenotype was observed on the surface of embryos from both treatments. Negative control experiments performed without the constructs encoding the r promoter sgRNAs produced no anthocyanin pigmentation indicating that the observed phenotypic change was directly related to the recruitment of CBF1 by dCas-alpha 10 and its sgRNA to the promoter of the r gene. Additionally, experiments performed using only the dCas-alpha10-CBF1 and respective sgRNA expression cassettes resulted in the largest number of anthocyanin positive cells showing that a dimer comprised just of dCas-alpha 10-CBF1 more efficiently activates gene expression than a heterodimer comprised of dCas-alpha 10 and dCas-alpha 10-CBF1 (FIG. 4). Additional Cas-alpha10 variants are disclosed in PCT/US2021/071839, which is incorporated by reference herein, including all of the sequences contained therein.

[0312] In a similar manner, dCASa10 can be fused to repressor motifs or epigenome-modifying factors such as histone deacylase inhibitors (Gilbert et al., 2013, Cell 154(2):442-51), or to CBF300-type proteins (histone acetyltransferase) which locally activate endogenous gene expression (Cheng et al., 2016, Cell Res 26, 254-257.

### Example 17. Agrobacterium-Mediated Delivery of a T-DNA Containing Cassettes for High Level Expression of Wus2 and a Diffusible Dcas-Alpha10 Ribonucleoprotein (Rnp) Targeted to Produce Cuts Flanking Waxy, Stimulating Both Somatic Embryo Formation and Waxy Deletions in Neighboring Cells

[0313] The Agrobacterium strain LBA4404 THY-TN- (with helper plasmid PHP71539; SEQ ID NO. 39) is used that also contains a plasmid (PHV00015; SEQ ID NO. 42) with a T-DNA containing RB+3×ENH::PLTP PRO::WUS2+NOS::CRC+UBI1ZM PRO::KN1CPP:PROTEIN LINKER1:CAS-ALPHA10 (ALT 35)+U6 PRO:gRNA-w1+U6 PRO:gRNA-w2+LB (where w1 and w2 are gRNA sequences targeting endogenous sequences flanking the maize WAXY gene). In this construct, the gene encoding CAS-ALPHA10 is fused to a flexible linker peptide (PROTEIN LINKER1, SEQ ID NO. 43) and the Cell Penetrating Peptide (CPP) from the maize transcription factor Knotted1 (SEQ ID NO. 44). Other CPP sequences are also known and suitable for use (Numata et al., 2018, Sci Rep 8, 10966; Kardani et al., 2021, J Mol Biol 433:16708). The CPP confers on the fusion protein (KN1CPP:PROTEIN LINKER1:CAS-ALPHA10) the ability to move from cell-to-cell (i.e. from the cell containing the T-DNA expressing the fusion protein into adjacent cells that contain no T-DNA).

[0314] A. Diffusible or Intercellular Transportable CAS-ALPHA10 Facilitates Editing in Cells that do not Receive and/or Integrate T-DNA.

[0315] Agrobacterium preparation, transformation maize immature embryos, resting, selection, maturation and rooting were done as described in previous EXAMPLES, using the T-DNA-containing plasmid PHV00015. After Agrobacterium infection and co-cultivation, the immature embryos are moved onto resting medium 605B for 7 days, and then all treatments are moved onto selection medium 13266N (13266P plus 150 mg/l G418) for 3 weeks, at which point all somatic embryos are moved through the maturation and rooting steps.

[0316] It is expected that i) high levels of WUS2 protein in the cells that receive the T-DNA will stimulate rapid somatic embryo formation in neighboring cells that did not receive the T-DNA, ii) continued high levels of WUS2 and CRC expression in cells that integrate the T-DNA will inhibit regeneration in these cells, and iii) cells that receive the T-DNA will also express KN1CPP:CAS-Alpha10 and the gRNA molecules w1 and w2, which will form KN1CPP:CAS-Alpha10/w1 and KN1CPP:CAS-Alpha10/w2 diffusible RNPs that migrate into neighboring cells and affect CAS-Alpha10-mediated cutting at the w1 and w2 endogenous target sites resulting in deletion of the WAXY gene. In this manner, both stimulation of rapid somatic embryo formation and WAXY deletion occur in neighboring cells to produce edited RO plants.

[0317] It should be noted that the duration for the composite culture steps in this protocol are: Agrobacterium infection—30 minutes; co-cultivation—2 days; resting culture—one week; selection culture—3 weeks; maturation—2 weeks; and rooting—2-3 weeks. At this point TO plants are sent to the greenhouse. This timeframe from Agrobacterium infection until the maturation stage is only 4 weeks, 2 days. This demonstrates that Agrobacterium-mediated delivery of WUS2 and KN1CPP:CAS-Alpha10 for targeted genome modification and rapid somatic embryo formation represents a substantially more rapid process than the morphogenic gene-enhanced transformation method reported in the literature by Lowe et al. (2016, Plant Cell 28:1998-2015, incorporated herein for reference) and used for maize CAS9-mediated editing (for example, see (Svitashev et al., 2015, Plant physiology 169:931-945, and Svitachev et al., 2016, Nat Commun 7:13274, incorporated herein for reference).

[0318] B. Use of a CAS-ALPHA10 variant allows temperature-controlled editing in cells that do not receive T-DNA

[0319] The method described in section “A” above, is used with a plasmid derived from PHV00016 with a T-DNA containing RB+3×ENH::PLTP PRO::WUS2+NOS::CRC+UBI1ZM PRO::KN1CPP:PROTEIN LINKER1:CAS-ALPHA10 (ALT 4)+U6 PRO:gRNA-w1+U6 PRO:gRNA-w2+NOS::CRC+LB, where the CAS-ALPHA10 (ALT4) coding sequence (SEQ ID NO. 54) has been altered to encode a CAS-ALPHA10 (ALT4) protein (SEQ ID NO. 60) which shows no cutting activity at room temperature but high cutting efficiency at 37° C.

[0320] When Agrobacterium strain LBA4404 THY-TN- (with helper plasmid PHP71539) containing PHV00016 is used for transformation of PHHSE immature embryos, both the WUS2 and the RNPs produced in the scutellar cell containing the T-DNA move into neighboring scutellar cells, stimulating somatic embryo formation in the neighboring cell. However, cutting at the two genomic target sequences flanking the endogenous WAXY gene (targeted by the gRNAs w1 and w2) does not occur at room temperature, but only after the immature embryos are cultured at 37° C. In this manner, CAS-ALPHA10-mediated editing in cells that have not received (or not integrated) the T-DNA is stimulated under this higher temperature.

[0321] C. Delivery of a T-DNA with expression cassettes for WUS2 and two WAXY gRNA sequences into an inbred that contains a pre-integrated UBI1ZM PRO::CAS-ALPHA10 (ALT4).

[0322] Stable single-copy transgenic lines of maize inbred PHH5E are produced using Agrobacterium strain LBA4404 THY-TN-(with helper plasmid PHP71539) harboring a plasmid PHV00017 (SEQ ID NO. 55) with a T-DNA containing an cassette for aleurone-specific expression of anthocyanin (Hv-LTP2 PRO::Zm-CRC) plus a constitutively expressed CAS-ALPHA10 (ALT4) gene (RB+Hv-LTP2 PRO::CRC+UBI1ZM PRO::CAS-ALPHA10 (ALT 4)+LB).

[0323] Into this temperature-conditional PHH5E inbred containing the pre-integrated temperature-conditional CAS-ALPHA10 (ALT4), a second Agrobacterium strain LBA4404 THY-TN- (with helper plasmid PHP71539) containing the plasmid PHV00018 (SEQ ID NO. 56) is used to deliver a T-DNA containing RB+3×ENH::PLTP PRO::WUS2+U6 PRO:gRNA-w1+U6 PRO:gRNA-w2+Si-UBI PRO::ZS-GREEN+LB. After delivery of this second WUS2/gRNAs/ZS-GREEN T-DNA to a scutellar cell of an immature embryo, both WUS2 protein and the expressed gRNA-w1 and gRNA-w2 diffuse to neighboring cells (not containing the WUS2/gRNAs/ZS-GREEN T-DNA). This initiates rapid somatic embryo formation in the neighboring cell, and when the immature embryo explant is incubated at 37° C., cutting of the w1 and w2 endogenous target sites occurs and the WAXY gene is deleted. After regeneration and crossing of plants containing the WAXY-deleted locus, the pre-existing CAS-ALPHA10 (ALT4) locus is segregated away, to produce progeny plants that contain only with WAXY deletion and no transgene T-DNAs.

[0324] D. Inbred maize that containing an integrated single copy of a T-DNA with high temperature conditional CAS-ALPHA10 (ALT4) plus a high temperature-inducible promoter driving expression of WUS2, for later altruistic expression of gRNAs and HDR templates.

[0325] Stable single-copy transgenic lines of maize inbred PHH5E are produced using Agrobacterium strain LBA4404 THY-TN-(with helper plasmid PHP71539) harboring a plasmid PHV00019 (SEQ ID NO. 57) with a T-DNA containing RB+HSP17.7 PRO::WUS2+UBI1ZM PRO::CAS-ALPHA10 (ALT 4)+LTP2::CRC+LB, where the HSP17.7 PRO drives no expression (or very attenuated expression) at room temperature, but drives high levels of expression when exposed to 37° C. overnight, or to 45° C. pulses (i.e. for 2-3 hours). This T-DNA is designated as CAS/WUS below, and the maize inbred containing a single copy of the integrated CAS/WUS T-DNA is referred to as PHH5E-CAS/WUS.

[0326] Into this single copy inbred line that now exhibits the phenotype of CAS-ALPHA10 (ALT4) cutting and WUS2-stimulated somatic embryo formation upon exposure to high temperature, an Agrobacterium strain LBA4404 THY-TN- (with helper plasmid PHP71539) containing the plasmid PHV00020 (SEQ ID NO. 58) is used to deliver a T-DNA containing RB+U6 PRO::gRNA-53.66+CHR1-53.66 TARGET SITE::SEQ 11-HR1:SI-UBI PRO::NPTII::SI_UBI TERM:SEQ12-HR2::CHR1-53.66 TARGET SITE+SB-UBI PRO::ZS-GREEN:: SB-UBI TERM+LB is used for transformation. This Agrobacterium containing the helper plasmid PHP71539 plus PHV00020 (Agrobacterium 1+Agro1) is adjusted to an OD of 0.5-0.6 at 550 nm and used to transform PHHSE-CAS/WUS immature embryos alone or is mixed with a second Agrobacterium adjusted to the same OD containing only the helper plasmid PHP71539 (Agrobacterium 2+Agro2). The Agro mixture is then used to transform the PHH5E (CAS/WUS) immature embryos. Agro1 can be mixed with Agro2 at a ratio of 100:0, 1000:1, 99:1, 90:10, 75:25, 50:50, 25:75, 10:90, 1:99, 1:1000. At a chosen ratio of Agro1:Agro2 of 10:90, the overall concentration of virulent Agrobacterium cells in the suspension remains high enough for optimal virulence and T-DNA delivery, while the copy number of T-DNAs delivered per cell is reduced, resulting in a high proportion of transformed cells that transiently express the gRNAs and contain the HDR template for targeted integration. In this manner, it is expected that successful HDR with no integration of the PHV00020 template T-DNA occurs at a high frequency.

### Example 18: Expressing Dcas-Alpha10:Cbf1a, Targeted to the Endogenous Wus2 and Bbm Promoter to Stimulate Rapid Somatic Embryo Formation

[0327] Agrobacterium strain LBA4404 THY-TN- harboring PHP71539 plus a T-DNA-containing plasmid PHV00021 (SEQ ID NO. 69) was used to transform maize inbred PHH5E immature embryos as described in EXAMPLE 4. This results in the delivery into the plant cells of the T-DNA containing RB+UBI1ZM PRO::dCAS9-ALPHA10:CBF1A::PINII TERM+U6 PRO:gRNA-wus1+U6 PRO:gRNA-wus2+U6 PRO:gRNA-wus3++U6 PRO:gRNA-bbm1+U6 PRO:gRNA-bbm2+U6 PRO:gRNA-bbm3+SB-UBI PRO::ZS-GREEN::OS-UBI TERM+LB.

[0328] One to four days after Agrobacterium infection, somatic embryos are formed on the scutellar epithelium of the infected immature embryos, which can rapidly be germinated into fertile plants.

[0329] Such a T-DNA can be delivered in a manner that favors transient expression of dCAS9-ALPHA10:CBF1A and the panel of gRNAs, while reducing the likelihood of T-DNA integration. For example, an Agrobacterium containing the helper plasmid PHP71539 plus PHV00021 (Agrobacterium 1+Agro1) is adjusted to an OD of 0.5-0.6 at 550 nm and used to transform PHH5E-CAS/WUS immature embryos alone or is mixed with a second Agrobacterium (both adjusted to the same OD) containing only the helper plasmid PHP71539 (Agrobacterium 2=Agro2). The Agro mixture is then used to transform the PHHSE (CAS/WUS) immature embryos. Agro1 can be mixed with Agro2 at a ratio of 100:0, 1000:1, 99:1, 90:10, 75:25, 50:50, 25:75, 10:90, 1:99, 1:1000. At a preferred ratio of Agro1:Agro2 of 10:90, the overall concentration of virulent Agrobacterium cells in the suspension remains high enough for optimal virulence and T-DNA delivery, while the copy number of T-DNAs delivered per cell is reduced, resulting in a high proportion of transformed cells that transiently express the gRNAs and contain the HDR template for targeted integration. In this manner, it is expected that successful stimulation of somatic embryo formation with no integration of the PHV00021 T-DNA occurs at a high frequency.

The application's sequence listing, which the Patent Office published only in electronic form, follows.

SEQUENCE LISTING (78 sequences)

SEQ ID NO: 1 - DNA, 5687 bp, Artificial sequence
  Synthetic
taaaacgacggccagtgaattgtaatacgactcactatagggcgaattgggttacccggccagaatggccgaattcgagatccctggccaccaaacatccctaatcatccccaaattttataggaactactaatttctctaacttaaaaaaaatctaaaatagtatactttagcagcctctcaatctgatttgttccccaaatttgaatcctggcttcgctctgtcacctgttgtactctacatggtgcgcagggggagagcctaatctttcacgactttgtttgtaactgttagccagaccggcgtatttgtcaatgtataaacacgtaataaaatttacgtaccatatagtaagactttgtatataagacgtcacctcttacgtgcatggttatatgcgacatgtgcagtgacgttatcagatatagctcaccctatatatatagctctgtccggtgtcagtagcaatcaccattcatcagcaccccggcaggtcgaccccgagctccctgcacctgccatggggatccgttgctcaggaaggccgctgagatagaggcatggcggccaatgcgggcggcggtggagcgggaggaggcagcggcagcggcagcgtggctgcgccggcggtgtgccgccccagcggctcgcggtggacgccgacgccggagcagatcaggatgctgaaggagctctactacggctgcggcatccggtcgcccagctcggagcagatccagcgcatcaccgccatgctgcggcagcacggcaagatcgagggcaagaacgtcttctactggttccagaaccacaaggcccgcgagcgccagaagcgccgcctcaccagcctcgacgtcaacgtgcccgccgccggcgcggccgacgccaccaccagccaactcggcgtcctctcgctgtcgtcgccgccgccttcaggtacgtgcgtcagtgcgtgtggtgtgtgggtagtatatatggtctctccttgcattggcacgccaatcggccatcgatccaatcatatcatcgtccaaacgtatatagtacatgtgactgcaaactgatgtgcaccgtcgtcatcactgatcaggcgcggcgcctccctcgcccaccctcggcttctacgccgccggcaatggcggcggatcggctgtgctgctggacacgagttccgactggggcagcagcggcgctgccatggccaccgagacatgcttcctgcaggtcggtgctgtagtacgttcttttcttgggcattgcgcgcagtttcacgttcgtacgtacgagttgatcgccgcgtcgttccatccaccggtatatataactgttaggtacggcggtgcgcgcccgcaggactacatgggcgtgacggacacgggcagctcgtcgcagtggccacgcttctcgtcgtcggacacgataatggcggcggccgcggcgcgggcggcgacgacgcgggcgcccgagacgctccctctcttcccgacctgcggcgacgacggcggcagcggtagcagcagctacttgccgttctggggtgccgcgtccacaactgccggcgccacttcttccgttgcgatccagcagcaacaccagctgcaggagcagtacagcttttacagcaacagcaacagcacccagctggccggcaccggcaaccaagacgtatcggcaacagcagcagcagccgccgccctggagctgagcctcagctcatggtgctccccttaccctgctgcagggagtatgtgagagcaacgcgagctgccactgctcttcacttatgtctctggaatggaaggaggaggaagtgagcatagcgttggtgcgttgctgtcattgtcctaggttagtagctagtgccagttactagaacatctgacaaagcagcattagtccgttgatcggtggaagaccactcgtcagtgttgagttgaatgtttgatcaataaaatacggcaatgctgtaagggttgttttttatgccattgataatacactgtactgttcagttgttgaactctatttcttagccatgccaagtgcttttcttattttgaataacattacagcaaaaagttgaaagacaaaaaaaaaaacccccgaacagagtgctttgggtcccaagcttctttagactgtgttcggcgttccccctaaatttctccccctatatctcactcacttgtcacatcagcgttctctttccccctatatctccacgctctacagcagttccacctatatcaaacctctataccccaccacaacaatattatatactttcatcttcaactaactcatgtaccttccaatttttttctactaataattatttacgtgcacagaaacttaggcaagggagagagagagcggtacccaattcgccctatagtgagtcgtattacaattcactggccgtcgttttacaacgtcgtgactgggaaaaccctgggggccccggccgaagcttggcctagaaggccggtcacccagcttgagtattctatagtgtcacctaaatagcttggcgtaatcatggtcatagctgtttcctgtgtgaaattgttatccgctcacaattccacacaacatacgagccggaagcataaagtgtaaagcctggggtgcctaatgagtgagctaactcacattaattgcgttgcgctcactgcccgctttccagtcgggaaacctgtcgtgccagctgcattaatgaatcggccaacgcgcggggagaggcggtttgcgtattgggcgctcttccgcttcctcgctcactgactcgctgcgctcggtcgttcggctgcggcgagcggtatcagctcactcaaaggcggtaatacggttatccacagaatcaggggataacgcaggaaagaacatgtgagcaaaaggccagcaaaaggccaggaaccgtaaaaaggccgcgttgctggcgtttttccataggctccgcccccctgacgagcatcacaaaaatcgacgctcaagtcagaggtggcgaaacccgacaggactataaagataccaggcgtttccccctggaagctccctcgtgcgctctcctgttccgaccctgccgcttaccggatacctgtccgcctttctcccttcgggaagcgtggcgctttctcatagctcacgctgtaggtatctcagttcggtgtaggtcgttcgctccaagctgggctgtgtgcacgaaccccccgttcagcccgaccgctgcgccttatccggtaactatcgtcttgagtccaacccggtaagacacgacttatcgccactggcagcagccactggtaacaggattagcagagcgaggtatgtaggcggtgctacagagttcttgaagtggtggcctaactacggctacactagaagaacagtatttggtatctgcgctctgctgaagccagttaccttcggaaaaagagttggtagctcttgatccggcaaacaaaccaccgctggtagcggtggtttttttgtttgcaagcagcagattacgcgcagaaaaaaaggatctcaagaagatcctttgatcttttctacggggtctgacgctcagtggaacgaaaactcacgttaagggattttggtcatggagccacgttgtgtctcaaaatctctgatgttacattgcacaagataaaaatatatcatcatgaacaataaaactgtctgcttacataaacagtaatacaaggggtgttatgagccatattcaacgggaaacgtcttgctcgaggccgcgattaaattccaacatggatgctgatttatatgggtataaatgggctcgcgataatgtcgggcaatcaggtgcgacaatctatcgattgtatgggaagcccgatgcgccagagttgtttctgaaacatggcaaaggtagcgttgccaatgatgttacagatgagatggtcagactaaactggctgacggaatttatgcctcttccgaccatcaagcattttatccgtactcctgatgatgcatggttactcaccactgcgatccccggaaaaacagcattccaggtattagaagaatatcctgattcaggtgaaaatattgttgatgcgctggcagtgttcctgcgccggttgcattcgattcctgtttgtaattgtccttttaacagcgatcgcgtatttcgtctcgctcaggcgcaatcacgaatgaataacggtttggttgatgcgagtgattttgatgacgagcgtaatggctggcctgttgaacaagtctggaaagaaatgcataaacttttgccattctcaccggattcagtcgtcactcatggtgatttctcacttgataaccttatttttgacgaggggaaattaataggttgtattgatgttggacgagtcggaatcgcagaccgataccaggatcttgccatcctatggaactgcctcggtgagttttctccttcattacagaaacggctttttcagaaatatggtattgataatcctgatatgaataaattgcagtttcatttgatgctcgatgagtttttctaatcagaattggttaattggttgtaacactggcagagcattacgctgacttgacgggacggcggctttgttgaataaatcgaacttttgctgagttgaaggatcagatcacgcatcttcccgacaacgcagaccgttccgtggcaaagcaaaagttcaaaatcaccaactggtccacctacaacaaagctctcatcaaccgtggctccctcactttctggctggatgatggggcgattcaggcctggtatgagtcagcaacaccttcttcacgagccatgacattaacctataaaaataggcgtatcacgaggccctttcgtctcgcgcgtttcggtgatgacggtgaaaacctctgacacatgcagctcccggagacggtcacagcttgtctgtaagcggatgccgggagcagacaagcccgtcagggcgcgtcagcgggtgttggcgggtgtcggggctggcttaactatgcggcatcagagcagattgtactgagagtgcaccatatgcggtgtgaaataccgcacagatgcgtaaggagaaaataccgcatcaggaaattgtaagcgttaatattttgttaaaattcgcgttaaatttttgttaaatcagctcattttttaaccaataggccgaaatcggcaaaatcccttataaatcaaaagaatagaccgagatagggttgagtgttgttccagtttggaacaagagtccactattaaagaacgtggactccaacgtcaaagggcgaaaaaccgtctatcagggcgatggcccactacgtgaaccatcaccctaatcaagttttttggggtcgaggtgccgtaaagcactaaatcggaaccctaaagggagcccccgatttagagcttgacggggaaagccggcgaacgtggcgagaaaggaagggaagaaagcgaaaggagcgggcgctagggcgctggcaagtgtagcggtcacgctgcgcgtaaccaccacacccgccgcgcttaatgcgccgctacagggcgcgtccattcgccattcaggctgcgcaactgttgggaagggcgatcggtgcgggcctcttcgctattacgccagctggcgaaagggggatgtgctgcaaggcgattaagttgggtaacgccagggttttcccagtcacgacgttg

SEQ ID NO: 2 - DNA, 6904 bp, Artificial sequence
  Synthetic
caggaaacagctatgaccatgattacgccaagctatcaactttgtatagaaaagttgaagcttcgctgaaatcaccagtctctctctacaaatctatctctctctataataatgtgtgagtagttcccagataagggaattagggttcttatagggtttcgctcatgtgttgagcatataagaaacccttagtatgtatttgtatttgtaaaatacttctatcaataaaatttctaattcctaaaaccaaaatccagtggcgagctgctagcgaagttcctattccgaagttcctattctctagaaagtataggaacttcagatccaccatgagcccagaacgacgcccggccgacatccgccgtgccaccgaggcggacatgccggcggtctgcaccatcgtcaaccactacatcgagacaagcacggtcaacttccgtaccgagccgcaggaaccgcaggactggacggacgacctcgtccgtctgcgggagcgctatccctggctcgtcgccgaggtggacggcgaggtcgccggcatcgcctacgcgggcccctggaaggcacgcaacgcctacgactggacggccgagtcgaccgtgtacgtctccccccgccaccagcggacgggactgggctccacgctctacacccacctgctgaagtccctggaggcacagggcttcaagagcgtggtcgctgtcatcgggctgcccaacgacccgagcgtgcgcatgcacgaggcgctcggatatgccccccgcggcatgctgcgggcggccggcttcaagcacgggaactggcatgacgtgggtttctggcagctggacttcagcctgccggtaccgccccgtccggtcctgcccgtcaccgagatctgatccgtcgaccaacctagacttgtccatcttctggattggccaacttaattaatgtatgaaataaaaggatgcacacatagtgacatgctaatcactataatgtgggcatcaaagttgtgtgttatgtgtaattactagttatctgaataaaagagaaagagatcatccatatttcttatcctaaatgaatgtcacgtgtctttataattctttgatgaaccagatgcatttcattaaccaaatccatatacatataaatattaatcatatataattaatatcaattgggttagcaaaacaaatctagtctaggtgtgttttgcgaattgcggccgggtaccgagctcgaattcggcccaagtttgtacaaaaaagcaggctccggccagaatggcccggaccgaagcttgcatgcctgcagtgcagcgtgacccggtcgtgcccctctctagagataatgagcattgcatgtctaagttataaaaaattaccacatattttttttgtcacacttgtttgaagtgcagtttatctatctttatacatatatttaaactttactctacgaataatataatctatagtactacaataatatcagtgttttagagaatcatataaatgaacagttagacatggtctaaaggacaattgagtattttgacaacaggactctacagttttatctttttagtgtgcatgtgttctcctttttttttgcaaatagcttcacctatataatacttcatccattttattagtacatccatttagggtttagggttaatggtttttatagactaatttttttagtacatctattttattctattttagcctctaaattaagaaaactaaaactctattttagtttttttatttaataatttagatataaaatagaataaaataaagtgactaaaaattaaacaaataccctttaagaaattaaaaaaactaaggaaacatttttcttgtttcgagtagataatgccagcctgttaaacgccgtcgacgagtctaacggacaccaaccagcgaaccagcagcgtcgcgtcgggccaagcgaagcagacggcacggcatctctgtcgctgcctctggacccctctcgagagttccgctccaccgttggacttgctccgctgtcggcatccagaaattgcgtggcggagcggcagacgtgagccggcacggcaggcggcctcctcctcctctcacggcaccggcagctacgggggattcctttcccaccgctccttcgctttcccttcctcgcccgccgtaataaatagacaccccctccacaccctctttccccaacctcgtgttgttcggagcgcacacacacacaaccagatctcccccaaatccacccgtcggcacctccgcttcaaggtacgccgctcgtcctcccccccccccctctctaccttctctagatcggcgttccggtccatgcatggttagggcccggtagttctacttctgttcatgtttgtgttagatccgtgtttgtgttagatccgtgctgctagcgttcgtacacggatgcgacctgtacgtcagacacgttctgattgctaacttgccagtgtttctctttggggaatcctgggatggctctagccgttccgcagacgggatcgatttcatgattttttttgtttcgttgcatagggtttggtttgcccttttcctttatttcaatatatgccgtgcacttgtttgtcgggtcatcttttcatgcttttttttgtcttggttgtgatgatgtggtctggttgggcggtcgttctagatcggagtagaattctgtttcaaactacctggtggatttattaattttggatctgtatgtgtgtgccatacatattcatagttacgaattgaagatgatggatggaaatatcgatctaggataggtatacatgttgatgcgggttttactgatgcatatacagagatgctttttgttcgcttggttgtgatgatgtggtgtggttgggcggtcgttcattcgttctagatcggagtagaatactgtttcaaactacctggtgtatttattaattttggaactgtatgtgtgtgtcatacatcttcatagttacgagtttaagatggatggaaatatcgatctaggataggtatacatgttgatgtgggttttactgatgcatatacatgatggcatatgcagcatctattcatatgctctaaccttgagtacctatctattataataaacaagtatgttttataattattttgatcttgatatacttggatgatggcatatgcagcagctatatgtggatttttttagccctgccttcatacgctatttatttgcttggtactgtttcttttgtcgatgctcaccctgttgtttggtgttacttctgcaggtcgactctagaggatccaccggtcgccaccatggccctgtccaacaagttcatcggcgacgacatgaagatgacctaccacatggacggctgcgtgaacggccactacttcaccgtgaagggcgagggcagcggcaagccctacgagggcacccagacctccaccttcaaggtgaccatggccaacggcggccccctggccttctccttcgacatcctgtccaccgtgttcatgtacggcaaccgctgcttcaccgcctaccccaccagcatgcccgactacttcaagcaggccttccccgacggcatgtcctacgagagaaccttcacctacgaggacggcggcgtggccaccgccagctgggagatcagcctgaagggcaactgcttcgagcacaagtccaccttccacggcgtgaacttccccgccgacggccccgtgatggccaagaagaccaccggctgggacccctccttcgagaagatgaccgtgtgcgacggcatcttgaagggcgacgtgaccgccttcctgatgctgcagggcggcggcaactacagatgccagttccacacctcctacaagaccaagaagcccgtgaccatgccccccaaccacgtggtggagcaccgcatcgccagaaccgacctggacaagggcggcaacagcgtgcagctgaccgagcacgccgtggcccacatcacctccgtggtgcccttctgaagcggccgcaacctagacttgtccatcttctggattggccaacttaattaatgtatgaaataaaaggatgcacacatagtgacatgctaatcactataatgtgggcatcaaagttgtgtgttatgtgtaattactagttatctgaataaaagagaaagagatcatccatatttcttatcctaaatgaatgtcacgtgtctttataattctttgatgaaccagatgcatttcattaaccaaatccatatacatataaatattaatcatatataattaatatcaattgggttagcaaaacaaatctagtctaggtgtgttttgcgaatgcggccgccaccgcggtggagctcgaattccggtccgggcctagaaggccgatctcccgggcacccagctttcttgtacaaagtggccgttaacggatcccggtgaagttcctattccgaagttcctattctccagaaagtataggaacttcactagagcttgcggccgccccgggcaactttattatacaaagttgataattcactggccgtcgttttacaacgtcgtgactgggaaaaccctggcgttacccaacttaatcgccttgcagcacatccccctttcgccagctggcgtaatagcgaagaggcccgcaccgatcgcccttcccaacagttgcgcagcctgaatggcgaatggcgcctgatgcggtattttctccttacgcatctgtgcggtatttcacaccgcatatggtgcactctcagtacaatctgctctgatgccgcatagttaagccagccccgacacccgccaacacccgctgacgcgccctgacgggcttgtctgctcccggcatccgcttacagacaagctgtgaccgtctccgggagctgcatgtgtcagaggttttcaccgtcatcaccgaaacgcgcgagacgaaagggcctcgtgatacgcctatttttataggttaatgtcatgataataatggtttcttagacgtcaggtggcacttttcggggaaatgtgcgcggaacccctatttgtttatttttctaaatacattcaaatatgtatccgctcatgagacaataaccctgataaatgcttcaataatattgaaaaaggaagagtatgagtattcaacatttccgtgtcgcccttattcccttttttgcggcattttgccttcctgtttttgctcacccagaaacgctggtgaaagtaaaagatgctgaagatcagttgggtgcacgagtgggttacatcgaactggatctcaacagcggtaagatccttgagagttttcgccccgaagaacgttttccaatgatgagcacttttaaagttctgctatgtggcgcggtattatcccgtattgacgccgggcaagagcaactcggtcgccgcatacactattctcagaatgacttggttgagtactcaccagtcacagaaaagcatcttacggatggcatgacagtaagagaattatgcagtgctgccataaccatgagtgataacactgcggccaacttacttctgacaacgatcggaggaccgaaggagctaaccgcttttttgcacaacatgggggatcatgtaactcgccttgatcgttgggaaccggagctgaatgaagccataccaaacgacgagcgtgacaccacgatgcctgtagcaatggcaacaacgttgcgcaaactattaactggcgaactacttactctagcttcccggcaacaattaatagactggatggaggcggataaagttgcaggaccacttctgcgctcggcccttccggctggctggtttattgctgataaatctggagccggtgagcgtgggtctcgcggtatcattgcagcactggggccagatggtaagccctcccgtatcgtagttatctacacgacggggagtcaggcaactatggatgaacgaaatagacagatcgctgagataggtgcctcactgattaagcattggtaactgtcagaccaagtttactcatatatactttagattgatttaaaacttcatttttaatttaaaaggatctaggtgaagatcctttttgataatctcatgaccaaaatcccttaacgtgagttttcgttccactgagcgtcagaccccgtagaaaagatcaaaggatcttcttgagatcctttttttctgcgcgtaatctgctgcttgcaaacaaaaaaaccaccgctaccagcggtggtttgtttgccggatcaagagctaccaactctttttccgaaggtaactggcttcagcagagcgcagataccaaatactgtccttctagtgtagccgtagttaggccaccacttcaagaactctgtagcaccgcctacatacctcgctctgctaatcctgttaccagtggctgctgccagtggcgataagtcgtgtcttaccgggttggactcaagacgatagttaccggataaggcgcagcggtcgggctgaacggggggttcgtgcacacagcccagcttggagcgaacgacctacaccgaactgagatacctacagcgtgagctatgagaaagcgccacgcttcccgaagggagaaaggcggacaggtatccggtaagcggcagggtcggaacaggagagcgcacgagggagcttccagggggaaacgcctggtatctttatagtcctgtcgggtttcgccacctctgacttgagcgtcgatttttgtgatgctcgtcaggggggcggagcctatggaaaaacgccagcaacgcggcctttttacggttcctggccttttgctggccttttgctcacatgttctttcctgcgttatcccctgattctgtggataaccgtattaccgcctttgagtgagctgataccgagcggataacaatttcaca

SEQ ID NO: 3 - DNA, 6269 bp, Artificial sequence
  Synthetic
tcgcgcgtttcggtgatgacggtgaaaacctctgacacatgcagctcccggagacggtcacagcttgtctgtaagcggatgccgggagcagacaagcccgtcagggcgcgtcagcgggtgttggcgggtgtcggggctggcttaactatgcggcatcagagcagattgtactgagagtgcaccatatgcggtgtgaaataccgcacagatgcgtaaggagaaaataccgcatcaggcgccattcgccattcaggctgcgcaactgttgggaagggcgatcggtgcgggcctcttcgctattacgccagctggcgaaagggggatgtgctgcaaggcgattaagttgggtaacgccagggttttcccagtcacgacgttgtaaaacgacggccagtgccaagcttgcatgcctgcagtgcagcgtgacccggtcgtgcccctctctagagataatgagcattgcatgtctaagttataaaaaattaccacatattttttttgtcacacttgtttgaagtgcagtttatctatctttatacatatatttaaactttactctacgaataatataatctatagtactacaataatatcagtgttttagagaatcatataaatgaacagttagacatggtctaaaggacaattgagtattttgacaacaggactctacagttttatctttttagtgtgcatgtgttctcctttttttttgcaaatagcttcacctatataatacttcatccattttattagtacatccatttagggtttagggttaatggtttttatagactaatttttttagtacatctattttattctattttagcctctaaattaagaaaactaaaactctattttagtttttttatttaataatttagatataaaatagaataaaataaagtgactaaaaattaaacaaataccctttaagaaattaaaaaaactaaggaaacatttttcttgtttcgagtagataatgccagcctgttaaacgccgtcgacgagtctaacggacaccaaccagcgaaccagcagcgtcgcgtcgggccaagcgaagcagacggcacggcatctctgtcgctgcctctggacccctctcgagagttccgctccaccgttggacttgctccgctgtcggcatccagaaattgcgtggcggagcggcagacgtgagccggcacggcaggcggcctcctcctcctctcacggcaccggcagctacgggggattcctttcccaccgctccttcgctttcccttcctcgcccgccgtaataaatagacaccccctccacaccctctttccccaacctcgtgttgttcggagcgcacacacacacaaccagatctcccccaaatccacccgtcggcacctccgcttcaaggtacgccgctcgtcctccccccccccccctctctaccttctctagatcggcgttccggtccatggttagggcccggtagttctacttctgttcatgtttgtgttagatccgtgtttgtgttagatccgtgctgctagcgttcgtacacggatgcgacctgtacgtcagacacgttctgattgctaacttgccagtgtttctctttggggaatcctgggatggctctagccgttccgcagacgggatcgatttcatgattttttttgtttcgttgcatagggtttggtttgcccttttcctttatttcaatatatgccgtgcacttgtttgtcgggtcatcttttcatgcttttttttgtcttggttgtgatgatgtggtctggttgggcggtcgttctagatcggagtagaattctgtttcaaactacctggtggatttattaattttggatctgtatgtgtgtgccatacatattcatagttacgaattgaagatgatggatggaaatatcgatctaggataggtatacatgttgatgcgggttttactgatgcatatacagagatgctttttgttcgcttggttgtgatgatgtggtgtggttgggcggtcgttcattcgttctagatcggagtagaatactgtttcaaactacctggtgtatttattaattttggaactgtatgtgtgtgtcatacatcttcatagttacgagtttaagatggatggaaatatcgatctaggataggtatacatgttgatgtgggttttactgatgcatatacatgatggcatatgcagcatctattcatatgctctaaccttgagtacctatctattataataaacaagtatgttttataattattttgatcttgatatacttggatgatggcatatgcagcagctatatgtggatttttttagccctgccttcatacgctatttatttgcttggtactgtttcttttgtcgatgctcaccctgttgtttggtgttacttctgcaggtcgactctagaggatccaacaatgccccagttcgacatcctctgcaagaccccccccaaggtgctcgtgaggcagttcgtggagaggttcgagaggccctccggcgagaagatcgccctctgcgccgccgagctcacctacctctgctggatgatcacccacaacggcaccgccattaagagggccaccttcatgtcatacaacaccatcatctccaactccctctccttcgacatcgtgaacaagtccctccagttcaaatacaagacccagaaggccaccatcctcgaggcctccctcaagaagctcatccccgcctgggagttcaccatcatcccctactacggccagaagcaccagtccgacatcaccgacatcgtgtcatccctccagcttcagttcgagtcctccgaggaggctgacaagggcaactcccactccaagaagatgctgaaggccctcctctccgagggcgagtccatctgggagatcaccgagaagatcctcaactccttcgagtacacctccaggttcactaagaccaagaccctctaccagttcctcttcctcgccaccttcatcaactgcggcaggttctcagacatcaagaacgtggaccccaagtccttcaagctcgtgcagaacaagtacctcggcgtgatcatccagtgcctcgtgaccgagaccaagacctccgtgtccaggcacatctacttcttctccgctcgcggcaggatcgaccccctcgtgtacctcgacgagttcctcaggaactcagagcccgtgctcaagagggtgaacaggaccggcaactcctcctccaacaagcaggagtaccagctcctcaaggacaacctcgtgaggtcctacaacaaggccctcaagaagaacgccccctactccatcttcgccatcaagaacggccccaagtcccacatcggtaggcacctcatgacctccttcctctcaatgaagggcctcaccgagctcaccaacgtggtgggcaactggtccgacaagagggcctccgccgtggccaggaccacctacacccaccagatcaccgccatccccgaccactacttcgccctcgtgtcaaggtactacgcctacgaccccatctccaaggagatgatcgccctcaaggacgagactaaccccatcgaggagtggcagcacatcgagcagctcaagggctccgccgagggctccatcaggtaccccgcctggaacggcatcatctcccaggaggtgctcgactacctctcctcctacatcaacaggaggatctgagttaacctagacttgtccatcttctggattggccaacttaattaatgtatgaaataaaaggatgcacacatagtgacatgctaatcactataatgtgggcatcaaagttgtgtgttatgtgtaattactagttatctgaataaaagagaaagagatcatccatatttcttatcctaaatgaatgtcacgtgtctttataattctttgatgaaccagatgcatttcattaaccaaatccatatacatataaatattaatcatatataattaatatcaattgggttagcaaaacaaatctagtctaggtgtgttttgcgaatgcggccgcgatctggggaattcgtaatcatgtcatagctgtttcctgtgtgaaattgttatccgctcacaattccacacaacatacgagccggaagcataaagtgtaaagcctggggtgcctaatgagtgagctaactcacattaattgcgttgcgctcactgcccgctttccagtcgggaaacctgtcgtgccagctgcattaatgaatcggccaacgcgcggggagaggcggtttgcgtattgggcgctcttccgcttcctcgctcactgactcgctgcgctcggtcgttcggctgcggcgagcggtatcagctcactcaaaggcggtaatacggttatccacagaatcaggggataacgcaggaaagaacatgtgagcaaaaggccagcaaaaggccaggaaccgtaaaaaggccgcgttgctggcgtttttccataggctccgcccccctgacgagcatcacaaaaatcgacgctcaagtcagaggtggcgaaacccgacaggactataaagataccaggcgtttccccctggaagctccctcgtgcgctctcctgttccgaccctgccgcttaccggatacctgtccgcctttctcccttcgggaagcgtggcgctttctcatagctcacgctgtaggtatctcagttcggtgtaggtcgttcgctccaagctgggctgtgtgcacgaaccccccgttcagcccgaccgctgcgccttatccggtaactatcgtcttgagtccaacccggtaagacacgacttatcgccactggcagcagccactggtaacaggattagcagagcgaggtatgtaggcggtgctacagagttcttgaagtggtggcctaactacggctacactagaagaacagtatttggtatctgcgctctgctgaagccagttaccttcggaaaaagagttggtagctcttgatccggcaaacaaaccaccgctggtagcggtggtttttttgtttgcaagcagcagattacgcgcagaaaaaaaggatctcaagaagatcctttgatcttttctacggggtctgacgctcagtggaacgaaaactcacgttaagggattttggtcatgagattatcaaaaaggatcttcacctagatccttttaaattaaaaatgaagttttaaatcaatctaaagtatatatgagtaaacttggtctgacagttaccaatgcttaatcagtgaggcacctatctcagcgatctgtctatttcgttcatccatagttgcctgactccccgtcgtgtagataactacgatacgggagggcttaccatctggccccagtgctgcaatgataccgcgagacccacgctcaccggctccagatttatcagcaataaaccagccagccggaagggccgagcgcagaagtggtcctgcaactttatccgcctccatccagtctattaattgttgccgggaagctagagtaagtagttcgccagttaatagtttgcgcaacgttgttgccattgctacaggcatcgtggtgtcacgctcgtcgtttggtatggcttcattcagctccggttcccaacgatcaaggcgagttacatgatcccccatgttgtgcaaaaaagcggttagctccttcggtcctccgatcgttgtcagaagtaagttggccgcagtgttatcactcatggttatggcagcactgcataattctcttactgtcatgccatccgtaagatgcttttctgtgactggtgagtactcaaccaagtcattctgagaatagtgtatgcggcgaccgagttgctcttgcccggcgtcaatacgggataataccgcgccacatagcagaactttaaaagtgctcatcattggaaaacgttcttcggggcgaaaactctcaaggatcttaccgctgttgagatccagttcgatgtaacccactcgtgcacccaactgatcttcagcatcttttactttcaccagcgtttctgggtgagcaaaaacaggaaggcaaaatgccgcaaaaaagggaataagggcgacacggaaatgttgaatactcatactcttcctttttcaatattattgaagcatttatcagggttattgtctcatgagcggatacatatttgaatgtatttagaaaaataaacaaataggggttccgcgcacatttccccgaaaagtgccacctgacgtctaagaaaccattattatcatgacattaacctataaaaataggcgtatcacgaggccctttcgtc

SEQ ID NO: 4 - DNA, 7842 bp, Artificial sequence
  Synthetic
ttttcccagtcacgacgttgtaaaacgacggccagtgaattgtaatacgactcactatagggcgaattgggttacccggaccgaagcttgcatgcctgcagtgcagcgtgacccggtcgtgcccctctctagagataatgagcattgcatgtctaagttataaaaaattaccacatattttttttgtcacacttgtttgaagtgcagtttatctatctttatacatatatttaaactttactctacgaataatataatctatagtactacaataatatcagtgttttagagaatcatataaatgaacagttagacatggtctaaaggacaattgagtattttgacaacaggactctacagttttatctttttagtgtgcatgtgttctcctttttttttgcaaatagcttcacctatataatacttcatccattttattagtacatccatttagggtttagggttaatggtttttatagactaatttttttagtacatctattttattctattttagcctctaaattaagaaaactaaaactctattttagtttttttatttaataatttagatataaaatagaataaaataaagtgactaaaaattaaacaaataccctttaagaaattaaaaaaactaaggaaacatttttcttgtttcgagtagataatgccagcctgttaaacgccgtcgacgagtctaacggacaccaaccagcgaaccagcagcgtcgcgtcgggccaagcgaagcagacggcacggcatctctgtcgctgcctctggacccctctcgagagttccgctccaccgttggacttgctccgctgtcggcatccagaaattgcgtggcggagcggcagacgtgagccggcacggcaggcggcctcctcctcctctcacggcaccggcagctacgggggattcctttcccaccgctccttcgctttcccttcctcgcccgccgtaataaatagacaccccctccacaccctctttccccaacctcgtgttgttcggagcgcacacacacacaaccagatctcccccaaatccacccgtcggcacctccgcttcaaggtacgccgctcgtcctcccccccccccctctctaccttctctagatcggcgttccggtccatgcatggttagggcccggtagttctacttctgttcatgtttgtgttagatccgtgtttgtgttagatccgtgctgctagcgttcgtacacggatgcgacctgtacgtcagacacgttctgattgctaacttgccagtgtttctctttggggaatcctgggatggctctagccgttccgcagacgggatcgatttcatgattttttttgtttcgttgcatagggtttggtttgcccttttcctttatttcaatatatgccgtgcacttgtttgtcgggtcatcttttcatgcttttttttgtcttggttgtgatgatgtggtctggttgggcggtcgttctagatcggagtagaattctgtttcaaactacctggtggatttattaattttggatctgtatgtgtgtgccatacatattcatagttacgaattgaagatgatggatggaaatatcgatctaggataggtatacatgttgatgcgggttttactgatgcatatacagagatgctttttgttcgcttggttgtgatgatgtggtgtggttgggcggtcgttcattcgttctagatcggagtagaatactgtttcaaactacctggtgtatttattaattttggaactgtatgtgtgtgtcatacatcttcatagttacgagtttaagatggatggaaatatcgatctaggataggtatacatgttgatgtgggttttactgatgcatatacatgatggcatatgcagcatctattcatatgctctaaccttgagtacctatctattataataaacaagtatgttttataattattttgatcttgatatacttggatgatggcatatgcagcagctatatgtggatttttttagccctgccttcatacgctatttatttgcttggtactgtttcttttgtcgatgctcaccctgttgtttggtgttacttctgcaggtcgactctagaggatccatggccactgtgaacaactggctcgctttctccctctccccgcaggagctgccgccctcccagacgacggactccacactcatctcggccgccaccgccgaccatgtctccggcgatgtctgcttcaacatcccccaagattggagcatgaggggatcagagctttcggcgctcgtcgcggagccgaagctggaggacttcctcggcggcatctccttctccgagcagcatcacaaggccaactgcaacatgatacccagcactagcagcacagtttgctacgcgagctcaggtgctagcaccggctaccatcaccagctgtaccaccagcccaccagctcagcgctccacttcgcggactccgtaatggtggcctcctcggccggtgtccacgacggcggtgccatgctcagcgcggccgccgctaacggtgtcgctggcgctgccagtgccaacggcggcggcatcgggctgtccatgattaagaactggctgcggagccaaccggcgcccatgcagccgagggtggcggcggctgagggcgcgcaggggctctctttgtccatgaacatggcggggacgacccaaggcgctgctggcatgccacttctcgctggagagcgcgcacgggcgcccgagagtgtatcgacgtcagcacagggtggagccgtcgtcgtcacggcgccgaaggaggatagcggtggcagcggtgttgccggcgctctagtagccgtgagcacggacacgggtggcagcggcggcgcgtcggctgacaacacggcaaggaagacggtggacacgttcgggcagcgcacgtcgatttaccgtggcgtgacaaggcatagatggactgggagatatgaggcacatctttgggataacagttgcagaagggaagggcaaactcgtaagggtcgtcaagtctatttaggtggctatgataaagaggagaaagctgctagggcttatgatcttgctgctctgaagtactggggtgccacaacaacaacaaattttccagtgagtaactacgaaaaggagctcgaggacatgaagcacatgacaaggcaggagtttgtagcgtctctgagaaggaagagcagtggtttctccagaggtgcatccatttacaggggagtgactaggcatcaccaacatggaagatggcaagcacggattggacgagttgcagggaacaaggatctttacttgggcaccttcagcacccaggaggaggcagcggaggcgtacgacatcgcggcgatcaagttccgcggcctcaacgccgtcaccaacttcgacatgagccgctacgacgtgaagagcatcctggacagcagcgccctccccatcggcagcgccgccaagcgcctcaaggaggccgaggccgcagcgtccgcgcagcaccaccacgccggcgtggtgagctacgacgtcggccgcatcgcctcgcagctcggcgacggcggagccctggcggcggcgtacggcgcgcactaccacggcgccgcctggccgaccatcgcgttccagccgggcgccgccagcacaggcctgtaccacccgtacgcgcagcagccaatgcgcggcggcgggtggtgcaagcaggagcaggaccacgcggtgatcgcggccgcgcacagcctgcaggacctccaccacctgaacctgggcgcggccggcgcgcacgactttttctcggcagggcagcaggccgccgccgctgcgatgcacggcctgggtagcatcgacagtgcgtcgctcgagcacagcaccggctccaactccgtcgtctacaacggcggggtcggcgacagcaacggcgccagcgccgtcggcggcagtggcggtggctacatgatgccgatgagcgctgccggagcaaccactacatcggcaatggtgagccacgagcaggtgcatgcacgggcctacgacgaagccaagcaggctgctcagatggggtacgagagctacctggtgaacgcggagaacaatggtggcggaaggatgtctgcatgggggactgtcgtgtctgcagccgcggcggcagcagcaagcagcaacgacaacatggccgccgacgtcggccatggcggcgcgcagctcttcagtgtctggaacgacacttaagcgtacgtgccggcctggctctccgaaagggcgaattccagcacactggcggccgttactagacccaacctagacttgtccatcttctggattggccaacttaattaatgtatgaaataaaaggatgcacacatagtgacatgctaatcactataatgtgggcatcaaagttgtgtgttatgtgtaattactagttatctgaataaaagagaaagagatcatccatatttcttatcctaaatgaatgtcacgtgtctttataattctttgatgaaccagatgcatttcattaaccaaatccatatacatataaatattaatcatatataattaatatcaattgggttagcaaaacaaatctagtctaggtgtgttttgcgaatgcggccgccaccgcggtggagctcgaattccggtccgggtcacccagcttgagtattctatagtgtcacctaaatagcttggcgtaatcatggtcatagctgtttcctgtgtgaaattgttatccgctcacaattccacacaacatacgagccggaagcataaagtgtaaagcctggggtgcctaatgagtgagctaactcacattaattgcgttgcgctcactgcccgctttccagtcgggaaacctgtcgtgccagctgcattaatgaatcggccaacgcgcggggagaggcggtttgcgtattgggcgctcttccgcttcctcgctcactgactcgctgcgctcggtcgttcggctgcggcgagcggtatcagctcactcaaaggcggtaatacggttatccacagaatcaggggataacgcaggaaagaacatgtgagcaaaaggccagcaaaaggccaggaaccgtaaaaaggccgcgttgctggcgtttttccataggctccgcccccctgacgagcatcacaaaaatcgacgctcaagtcagaggtggcgaaacccgacaggactataaagataccaggcgtttccccctggaagctccctcgtgcgctctcctgttccgaccctgccgcttaccggatacctgtccgcctttctcccttcgggaagcgtggcgctttctcatagctcacgctgtaggtatctcagttcggtgtaggtcgttcgctccaagctgggctgtgtgcacgaaccccccgttcagcccgaccgctgcgccttatccggtaactatcgtcttgagtccaacccggtaagacacgacttatcgccactggcagcagccactggtaacaggattagcagagcgaggtatgtaggcggtgctacagagttcttgaagtggtggcctaactacggctacactagaagaacagtatttggtatctgcgctctgctgaagccagttaccttcggaaaaagagttggtagctcttgatccggcaaacaaaccaccgctggtagcggtggtttttttgtttgcaagcagcagattacgcgcagaaaaaaaggatctcaagaagatcctttgatcttttctacggggtctgacgctcagtggaacgaaaactcacgttaagggattttggtcatggagccacgttgtgtctcaaaatctctgatgttacattgcacaagataaaaatatatcatcatgaacaataaaactgtctgcttacataaacagtaatacaaggggtgttatgagccatattcaacgggaaacgtcttgctcgaggccgcgattaaattccaacatggatgctgatttatatgggtataaatgggctcgcgataatgtcgggcaatcaggtgcgacaatctatcgattgtatgggaagcccgatgcgccagagttgtttctgaaacatggcaaaggtagcgttgccaatgatgttacagatgagatggtcagactaaactggctgacggaatttatgcctcttccgaccatcaagcattttatccgtactcctgatgatgcatggttactcaccactgcgatccccggaaaaacagcattccaggtattagaagaatatcctgattcaggtgaaaatattgttgatgcgctggcagtgttcctgcgccggttgcattcgattcctgtttgtaattgtccttttaacagcgatcgcgtatttcgtctcgctcaggcgcaatcacgaatgaataacggtttggttgatgcgagtgattttgatgacgagcgtaatggctggcctgttgaacaagtctggaaagaaatgcataaacttttgccattctcaccggattcagtcgtcactcatggtgatttctcacttgataaccttatttttgacgaggggaaattaataggttgtattgatgttggacgagtcggaatcgcagaccgataccaggatcttgccatcctatggaactgcctcggtgagttttctccttcattacagaaacggctttttcagaaatatggtattgataatcctgatatgaataaattgcagtttcatttgatgctcgatgagtttttctaatcagaattggttaattggttgtaacactggcagagcattacgctgacttgacgggacggcggctttgttgaataaatcgaacttttgctgagttgaaggatcagatcacgcatcttcccgacaacgcagaccgttccgtggcaaagcaaaagttcaaaatcaccaactggtccacctacaacaaagctctcatcaaccgtggctccctcactttctggctggatgatggggcgattcaggcctggtatgagtcagcaacaccttcttcacgagccatgacattaacctataaaaataggcgtatcacgaggccctttcgtctcgcgcgtttcggtgatgacggtgaaaacctctgacacatgcagctcccggagacggtcacagcttgtctgtaagcggatgccgggagcagacaagcccgtcagggcgcgtcagcgggtgttggcgggtgtcggggctggcttaactatgcggcatcagagcagattgtactgagagtgcaccatatgcggtgtgaaataccgcacagatgcgtaaggagaaaataccgcatcaggaaattgtaagcgttaatattttgttaaaattcgcgttaaatttttgttaaatcagctcattttttaaccaataggccgaaatcggcaaaatcccttataaatcaaaagaatagaccgagatagggttgagtgttgttccagtttggaacaagagtccactattaaagaacgtggactccaacgtcaaagggcgaaaaaccgtctatcagggcgatggcccactacgtgaaccatcaccctaatcaagttttttggggtcgaggtgccgtaaagcactaaatcggaaccctaaagggagcccccgatttagagcttgacggggaaagccggcgaacgtggcgagaaaggaagggaagaaagcgaaaggagcgggcgctagggcgctggcaagtgtagcggtcacgctgcgcgtaaccaccacacccgccgcgcttaatgcgccgctacagggcgcgtccattcgccattcaggctgcgcaactgttgggaagggcgatcggtgcgggcctcttcgctattacgccagctggcgaaagggggatgtgctgcaaggcgattaagttgggtaacgccaggg

SEQ ID NO: 5 - DNA, 6732 bp, Artificial sequence
  Synthetic
ccctactctcgcgttaacgctagcatggatgttttcccagtcacgacgttgtaaaacgacggccagtcttaagctcgggccccaaataatgattttattttgactgatagtgacctgttcgttgcaacaaattgatgagcaatgcttttttataatgccaactttgtacaaaaaagcaggctccggccagaatggcccggaccgggttacgttaccgaattcttaccctagctccctgcggctgttacgcggtcccccatcaatcttctgttcttgcggttgtagcctgtgtaacagtgctagagtatgtatgataaataggttttaagtctgcttacatgacattttttattgtggaagagacatataaaaattagagagagtggttctcatgcaacggcggacggcccggtgctaaaagagcttcaagacaaaataatgaaacaggaagagagtagatttatctaagagccaactttattatatgaatgtgtttattgttggctttagatgatatggtaaggagttagagctaataatagataggctctattattattattattaattaaactcgctctaaggaggaaagtgggaggaagggacgaggacgaagactactggaagcatcgtgcatggatgatggatgtggtgtctcttaatgtaggtggccggaggatgtacgtgttaattgcgcgataagcactcagatccaaccgcaaactacctccacactgacacactgatagagagaaagagagacctccgacgactgccgccgcagatgagccacgtacgtatacgacgtctgccggccggctcaggctgccgccatcaccctgctcgaaagtcgcgttaggcggcgccagctacataggagtatctagtctagccagttagtatactactactgcgctgatgatgaattaactctgcatagatactgtacttgcctccctccaacacccaaccacctcctgctcggctcttaataacttggacacggatcgatgccatccaaggaagaacacgacgacgacgacggaacatccaccatgcaagcttgcatccatacgccgatacgcgtgcatccatccatccaccattatttccattttccaccgatcacacgtacacaggcctatttaaggagcgacatcccactgcaactctcctcaccactcatcaccagctagctctagcaaagcacttgccatctaccgaccgccgcattccaaacagcccgacgagctagcagagcggcaggcacctccctcctcaaggaacccatggccactgtgaacaactggctcgctttctccctctccccgcaggagctgccgccctcccagacgacggactccacactcatctcggccgccaccgccgaccatgtctccggcgatgtctgcttcaacatcccccaagattggagcatgaggggatcagagctttcggcgctcgtcgcggagccgaagctggaggacttcctcggcggcatctccttctccgagcagcatcacaaggccaactgcaacatgatacccagcactagcagcacagtttgctacgcgagctcaggtgctagcaccggctaccatcaccagctgtaccaccagcccaccagctcagcgctccacttcgcggactccgtaatggtggcttcctcggccggtgtccacgacggcggtgccatgctcagcgcggccgccgctaacggtgtcgctggcgctgccagtgccaacggcggcggcatcgggctgtccatgattaagaactggctgcggagccaaccggcgcccatgcagccgagggtggcggcggctgagggcgcgcaggggctctctttgtccatgaacatggcggggacgacccaaggcgctgctggcatgccacttctcgctggagagcgcgcacgggcgcccgagagtgtatcgacgtcagcacagggtggagccgtcgtcgtcacggcgccgaaggaggatagcggtggcagcggtgttgccggcgctctagtagccgtgagcacggacacgggtggcagcggcggcgcgtcggctgacaacacggcaaggaagacggtggacacgttcgggcagcgcacgtcgatttaccgtggcgtgacaaggcatagatggactgggagatatgaggcacatctttgggataacagttgcagaagggaagggcaaactcgtaagggtcgtcaagtctatttaggtggctatgataaagaggagaaagctgctagggcttatgatcttgctgctctgaagtactggggtgccacaacaacaacaaattttccagtgagtaactacgaaaaggagctcgaggacatgaagcacatgacaaggcaggagtttgtagcgtctctgagaaggaagagcagtggtttctccagaggtgcatccatttacaggggagtgactaggcatcaccaacatggaagatggcaagcacggattggacgagttgcagggaacaaggatctttacttgggcaccttcagcacccaggaggaggcagcggaggcgtacgacatcgcggcgatcaagttccgcggcctcaacgccgtcaccaacttcgacatgagccgctacgacgtgaagagcatcctggacagcagcgccctccccatcggcagcgccgccaagcgcctcaaggaggccgaggccgcagcgtccgcgcagcaccaccacgccggcgtggtgagctacgacgtcggccgcatcgcctcgcagctcggcgacggcggagccctggcggcggcgtacggcgcgcactaccacggcgccgcctggccgaccatcgcgttccagccgggcgccgccagcacaggcctgtaccacccgtacgcgcagcagccaatgcgcggcggcgggtggtgcaagcaggagcaggaccacgcggtgatcgcggccgcgcacagcctgcaggacctccaccacctgaacctgggcgcggccggcgcgcacgactttttctcggcagggcagcaggccgccgccgctgcgatgcacggcctgggtagcatcgacagtgcgtcgctcgagcacagcaccggctccaactccgtcgtctacaacggcggggtcggcgacagcaacggcgccagcgccgtcggcggcagtggcggtggctacatgatgccgatgagcgctgccggagcaaccactacatcggcaatggtgagccacgagcaggtgcatgcacgggcctacgacgaagccaagcaggctgctcagatggggtacgagagctacctggtgaacgcggagaacaatggtggcggaaggatgtctgcatgggggactgtcgtgtctgcagccgcggcggcagcagcaagcagcaacgacaacatggccgccgacgtcgggcatggcggcgcgcagctcttcagtgtctggaacgacacttaagcgtacctagtggtacctgacatcttatagtctgcaacctctcgtgtctgaattcctatctttatcaagtgttattgcttccacgactataggacagctttcgtcgaaagcttttgctcatgtgatctcgaaggattcatctagtctgatttttcgtgacttgtatcggttttattggattcatccaacatatatcaataaaaaatgagttgtgtttcctttcttcctagttcagttaaaattatttccctcctgcgcttgtgctgtaattgtctgtgtacctgttgtttgtgactgtgttagttcccttggatatgatttcgtatttgatatgtacatggagatagcttagcttcattattggagtatgaagttagtatgacatagtcactctcctggaaaattgacactgcaaaccatatttttattctgaaccacaaatcctagtcagtccgctggcatatgccgtccgtttgctgaatccagaacgtgggtttggagatgtacggctgagatgcctctatgcgaaggggatttcgtggtgaaacgagatgggagtagagcaacgcccgtggaagatgcttcaaacttccacacttttgagcaacgatcggcagtagtaaggtagacgatttcaagatcaaagcatatgaagataaacaacatcaacaacaaaatttgttggggttctatagagagaaacagagctacatacatacactgttttgtatctaccatctgagatgatgaaaagatgaaaaactaaagaatgccccggcgccaacgccaggacacgccgcgcgcgcgtcacccgagccatctcttgacccagccggcgctgtatatttacacacgttgcagcatcgatcaccacctgttcgatcgcgtcgccgtcaccggtaccgagctcgaattccggtccgggcctagaaggccgatctcccgggcacccagctttcttgtacaaagttggcattataagaaagcattgcttatcaatttgttgcaacgaacaggtcactatcagtcaaaataaaatcattatttgccatccagctgatatcccctatagtgagtcgtattacatggtcatagctgtttcctggcagctctggcccgtgtctcaaaatctctgatgttacattgcacaagataaaaatatatcatcatgaacaataaaactgtctgcttacataaacagtaatacaaggggtgttatgagccatattcaacgggaaacgtcgaggccgcgattaaattccaacatggatgctgatttatatgggtataaatgggctcgcgataatgtcgggcaatcaggtgcgacaatctatcgcttgtatgggaagcccgatgcgccagagttgtttctgaaacatggcaaaggtagcgttgccaatgatgttacagatgagatggtcagactaaactggctgacggaatttatgcctcttccgaccatcaagcattttatccgtactcctgatgatgcatggttactcaccactgcgatccccggaaaaacagcattccaggtattagaagaatatcctgattcaggtgaaaatattgttgatgcgctggcagtgttcctgcgccggttgcattcgattcctgtttgtaattgtccttttaacagcgatcgcgtatttcgtctcgctcaggcgcaatcacgaatgaataacggtttggttgatgcgagtgattttgatgacgagcgtaatggctggcctgttgaacaagtctggaaagaaatgcataaacttttgccattctcaccggattcagtcgtcactcatggtgatttctcacttgataaccttatttttgacgaggggaaattaataggttgtattgatgttggacgagtcggaatcgcagaccgataccaggatcttgccatcctatggaactgcctcggtgagttttctccttcattacagaaacggctttttcaaaaatatggtattgataatcctgatatgaataaattgcagtttcatttgatgctcgatgagtttttctaatcagaattggttaattggttgtaacactggcagagcattacgctgacttgacgggacggcgcaagctcatgaccaaaatcccttaacgtgagttacgcgtcgttccactgagcgtcagaccccgtagaaaagatcaaaggatcttcttgagatcctttttttctgcgcgtaatctgctgcttgcaaacaaaaaaaccaccgctaccagcggtggtttgtttgccggatcaagagctaccaactctttttccgaaggtaactggcttcagcagagcgcagataccaaatactgttcttctagtgtagccgtagttaggccaccacttcaagaactctgtagcaccgcctacatacctcgctctgctaatcctgttaccagtggctgctgccagtggcgataagtcgtgtcttaccgggttggactcaagacgatagttaccggataaggcgcagcggtcgggctgaacggggggttcgtgcacacagcccagcttggagcgaacgacctacaccgaactgagatacctacagcgtgagctatgagaaagcgccacgcttcccgaagggagaaaggcggacaggtatccggtaagcggcagggtcggaacaggagagcgcacgagggagcttccagggggaaacgcctggtatctttatagtcctgtcgggtttcgccacctctgacttgagcgtcgatttttgtgatgctcgtcaggggggcggagcctatggaaaaacgccagcaacgcggcctttttacggttcctggccttttgctggccttttgctcacatgttctttcctgcgttatcccctgattctgtggataaccgtattaccgcctttgagtgagctgataccgctcgccgcagccgaacgaccgagcgcagcgagtcagtgagcgaggaagcggaagagcgcccaatacgcaaaccgcctctccccgcgcgttggccgattcattaatgcagctggcacgacaggtttcccgactggaaagcgggcagtgagcgcaacgcaattaatacgcgtaccgctagccaggaagagtttgtagaaacgcaaaaaggccatccgtcaggatggccttctgcttagtttgatgcctggcagtttatggcgggcgtcctgcccgccaccctccgggccgttgcttcacaacgttcaaatccgctcccggcggatttgtcctactcaggagagcgttcaccgacaaacaacagataaaacgaaaggcccagtcttccgactgagcctttcgttttatttgatgcctggcagtt

SEQ ID NO: 6 - DNA, 5365 bp, Artificial sequence
  Synthetic
cgttcaccgacaaacaacagataaaacgaaaggcccagtcttccgactgagcctttcgttttatttgatgcctggcagttccctactctcgcgttcatggagctccaaataatgattttattttgactgatagtgacctgttcgttgcaacaaattgataagcaatgcttttttataatgccaactttgtatagaaaagttgggccgagctcggtacggccagaatggcccggaccgggttaccgaattcttaccctagctccctgcggctgttacgcggtcccccatcaatcttctgttcttgcggttgtagcctgtgtaacagtgctagagtatgtatgataaataggttttaagtctgcttacatgacattttttattgtggaagagacatataaaaattagagagagtggttctcatgcaacggcggacggcccggtgctaaaagagcttcaagacaaaataatgaaacaggaagagagtagatttatctaagagccaactttattatatgaatgtgtttattgttggctttagatgatatggtaaggagttagagctaataatagataggctctattattattattattaattaaactcgctctaaggaggaaagtgggaggaagggacgaggacgaagactactggaagcatcgtgcatggatgatggatgtggtgtctcttaatgtaggtggccggaggatgtacgtgttaattgcgcgataagcactcagatccaaccgcaaactacctccacactgacacactgatagagagaaagagagacctccgacgactgccgccgcagatgagccacgtacgtatacgacgtctgccggccggctcaggctgccgccatcaccctgctcgaaagtcgcgttaggcggcgccagctacataggagtatctagtctagccagttagtatactactactgcgctgatgatgaattaactctgcatagatactgtacttgcctccctccaacacccaaccacctcctgctcggctcttaataacttggacacggatcgatgccatccaaggaagaacacgacgacgacgacggaacatccaccatgcaagcttgcatccatacgccgatacgcgtgcatccatccatccaccattatttccattttccaccgatcacacgtacacaggcctatttaaggagcgacatcccactgcaactctcctcaccactcatcaccagctagctctagcaaagcacttgccatctaccgaccgccgcattccaaacagcccgacgagctagcagagcggcaggcacctccctcctcaaggaacccatggcggccaatgcgggcggcggtggagcgggaggaggcagcggcagcggcagcgtggctgcgccggcggtgtgccgccccagcggctcgcggtggacgccgacgccggagcagatcaggatgctgaaggagctctactacggctgcggcatccggtcgcccagctcggagcagatccagcgcatcaccgccatgctgcggcagcacggcaagatcgagggcaagaacgtcttctactggttccagaaccacaaggcccgcgagcgccagaagcgccgcctcaccagcctcgacgtcaacgtgcccgccgccggcgcggccgacgccaccaccagccaactcggcgtcctctcgctgtcgtcgccgccgccttcaggcgcggcgcctccctcgcccaccctcggcttctacgccgccggcaatggcggcggatcggctgtgctgctggacacgagttccgactggggcagcagcggcgctgctatggccaccgagacatgcttcctgcaggactacatgggcgtgacggacacgggcagctcgtcgcagtggccacgcttctcgtcgtcggacacgataatggcggcggccgcggcgcgggcggcgacgacgcgggcgcccgagacgctccctctcttcccgacctgcggcgacgacggcggcagcggtagcagcagctacttgccgttctggggtgccgcgtccacaactgccggcgccacttcttccgttgcgatccaacagcaacaccagctgcaggagcagtacagcttttacagcaacagcaacagcacccagctggccggcaccggcaaccaagacgtatcggcaacagcagcagcagccgccgccctggagctgagcctcagctcatggtgctccccttaccctgctgcagggagtatgtgagagcaacgcgagctgccactgctcttcactgatgtctctggaatggaaggaggaggaagtgagaacagatcattcgacaaagcagcattagtccgttgatcggtggaagaccactcgtcagtgttgagttgaatgtttgatcaataaaatacggcaatgctgtaagggttgttttttatgccattgataatacactgtactgttcagttgttgaactctatttcttagccatgccaagtgcttttcttattttgaataacattacagcaaaaagttgaaagacaaaaaaaaaaacccccgaacagagtgctttgggtcccaagcttctttagactgtgttcggcgttccccctaaatttctccccctatatctcactcacttgtcacatcagcgttctctttccccctatatctccacgctctacagcagttccacctatatcaaacctctataccccaccacaacaatattatatactttcatcttcaactaactcatgtaccttccaatttttttctactaataattatttacgtgcacagaaacttagcaaggagagagagagcggggtgacccaccttgctagttggatattacctcttctcttcaaagtatccttgaacgctcaccggttatcaaatctctacactatagctctgtagtcttgctagatagttagttctttagctctcggtgaccaagcttggcgcgatcaagcttatcgataccgtcgacctcgaagcttggtcacccggtccgggcctagaaggccagcttcaagtttgtacaaaaaagttgaacgagaaacgtaaaatgatataaatatcaatatattaaattagattttgcataaaaaacagactacataatactgtaaaacacaacatatgcagtcactatgaaccaactacttagatggtattagtgacctgtagaattcgagctctagagctgcagggcggccgcgatatcccctatagtgagtcgtattacatggtcatagctgtttcctggcagctctggcccgtgtctcaaaatctctgatgttacattgcacaagataaaaatatatcatcatgaacaataaaactgtctgcttacataaacagtaatacaaggggtgttatgagccatattcaacgggaaacgtcgaggccgcgattaaattccaacatggatgctgatttatatgggtataaatgggctcgcgataatgtcgggcaatcaggtgcgacaatctatcgcttgtatgggaagcccgatgcgccagagttgtttctgaaacatggcaaaggtagcgttgccaatgatgttacagatgagatggtcagactaaactggctgacggaatttatgcctcttccgaccatcaagcattttatccgtactcctgatgatgcatggttactcaccactgcgatccccggaaaaacagcattccaggtattagaagaatatcctgattcaggtgaaaatattgttgatgcgctggcagtgttcctgcgccggttgcattcgattcctgtttgtaattgtccttttaacagcgatcgcgtatttcgtctcgctcaggcgcaatcacgaatgaataacggtttggttgatgcgagtgattttgatgacgagcgtaatggctggcctgttgaacaagtctggaaagaaatgcataaacttttgccattctcaccggattcagtcgtcactcatggtgatttctcacttgataaccttatttttgacgaggggaaattaataggttgtattgatgttggacgagtcggaatcgcagaccgataccaggatcttgccatcctatggaactgcctcggtgagttttctccttcattacagaaacggctttttcaaaaatatggtattgataatcctgatatgaataaattgcagtttcatttgatgctcgatgagtttttctaatcagaattggttaattggttgtaacactggcagagcattacgctgacttgacgggacggcgcaagctcatgaccaaaatcccttaacgtgagttacgcgtcgttccactgagcgtcagaccccgtagaaaagatcaaaggatcttcttgagatcctttttttctgcgcgtaatctgctgcttgcaaacaaaaaaaccaccgctaccagcggtggtttgtttgccggatcaagagctaccaactctttttccgaaggtaactggcttcagcagagcgcagataccaaatactgttcttctagtgtagccgtagttaggccaccacttcaagaactctgtagcaccgcctacatacctcgctctgctaatcctgttaccagtggctgctgccagtggcgataagtcgtgtcttaccgggttggactcaagacgatagttaccggataaggcgcagcggtcgggctgaacggggggttcgtgcacacagcccagcttggagcgaacgacctacaccgaactgagatacctacagcgtgagctatgagaaagcgccacgcttcccgaagggagaaaggcggacaggtatccggtaagcggcagggtcggaacaggagagcgcacgagggagcttccagggggaaacgcctggtatctttatagtcctgtcgggtttcgccacctctgacttgagcgtcgatttttgtgatgctcgtcaggggggcggagcctatggaaaaacgccagcaacgcggcctttttacggttcctggccttttgctggccttttgctcacatgttctttcctgcgttatcccctgattctgtggataaccgtattaccgcctttgagtgagctgataccgctcgccgcagccgaacgaccgagcgcagcgagtcagtgagcgaggaagcggaagagcgcccaatacgcaaaccgcctctccccgcgcgttggccgattcattaatgcagctggcacgacaggtttcccgactggaaagcgggcagtgagcgcaacgcaattaatacgcgtaccgctagccaggaagagtttgtagaaacgcaaaaaggccatccgtcaggatggccttctgcttagtttgatgcctggcagtttatggcgggcgtcctgcccgccaccctccgggccgttgcttcacaacgttcaaatccgctcccggcggatttgtcctactcaggagag

SEQ ID NO: 7 - DNA, 9914 bp, Artificial sequence
  Synthetic
gtttacccgccaatatatcctgtcaaacactgcggccgcacttgaccgcggatggagccggagctgtggtgaggccatcgacgggaggtgggggagaacacagtctcagtgttctttgtgagtccgcaaggtttttagcttttctgtattaattaaggttgctgttggctgtagaatacggtcgtggaagagctgtatcggtagctactacgtaagctattatatactggaagtctggagctcgtcgatctccggtcgtcttcctccatttctcctcgtcttgctttgactgctgctaccatttgcttctgttttctgatgaagcatgccatgtcggccaccagtgtttgtgtggtttttgcagggaatggctttcaagtgctgtgattgaatggccctcgtcgtcctcggctgagctcacatggacgcgtcatgtgagtgagatatatgatcatatgatgagtggggttcgggtgagtgcgtacttgaagtaggatcccgctttcactcattcattcattggcctttaaaccgggaaattttcgcgaggagatggagggaagcaagcagggtgacgagtgcagagtgccgcgagcgctttgtcaaaaggcaccgccgtaggcaaaaaaatcaatggccctgactgactcgatggtagtactactgtagagactagagagggttgctccccatatcttcgtgtgacttttactccagcattgcatttccgtcattgagacgttaattaatagcagctttcgggacagatgactgtggccatgtttcgtcacggccgcttcgtgccagctgggggtactatagtactgtgattttgttagtaaaaactttcattaggccaccattgacgaccgggccttcgcttttgctgcgctaattaaccatttcccggcgaccgaagggaacatgaacatgccccgacacatgagggcatgaggactagtgttctccctgtcgttcgttgacttgactagtgatagtttaaacgctcttcaactggaagagcggttactaccggttcactagctagctgctaatcgagctagttaccctatgaggtgacatgaagcgctcacggttactatgacggttagcttcacgactgttggtggcagtagcgtacgacttagctatagttccggacttacccttaagataacttcgtatagcatacattatacgaagttatgggcccacgcgtgaagagcggttaccagagctggtcacctttgtccaccaagatggaactgtcttcggccagaatggccatctggattcagcaggcctagaaggccatttatcgctatcaactttgtatagaaaagttgggccagaatggcccggaccgggttaccaagcggccgcggaaaaccgtcgacctcgagagcatgcacggatagatggcgtctagcatatcgataggacatgacaagtggtacgatccccgtcacatgtccatggaggcatctgatatggacacggcgtgtatctatcgcggctggaacagaaccagcgctcgcgcggcggtcggcgggagggacagaccttggctccgtgcgttcaggttgtgcttgtgccgcgcgccacgcacggtctccgccgcctgcagctgaaattttagatttacatcctatccctttattttttttatttgtcacaattcagttcaaaaatgaagaacggaggtagtgcatcctttgtgagactaatgaaaatcacatctggatcctgaaatcggcgtcgtaacctacaaggccacggactggattagatagtggtccatggtgcataatgaggatcgaggcacggttacccggaccgaagcttgcatgcctgcagtgcagcgtgacccggtcgtgcccctctctagagataatgagcattgcatgtctaagttataaaaaattaccacatattttttttgtcacacttgtttgaagtgcagtttatctatctttatacatatatttaaactttactctacgaataatataatctatagtactacaataatatcagtgttttagagaatcatataaatgaacagttagacatggtctaaaggacaattgagtattttgacaacaggactctacagttttatctttttagtgtgcatgtgttctcctttttttttgcaaatagcttcacctatataatacttcatccattttattagtacatccatttagggtttagggttaatggtttttatagactaatttttttagtacatctattttattctattttagcctctaaattaagaaaactaaaactctattttagtttttttatttaataatttagatataaaatagaataaaataaagtgactaaaaattaaacaaataccctttaagaaattaaaaaaactaaggaaacatttttcttgtttcgagtagataatgccagcctgttaaacgccgtcgacgagtctaacggacaccaaccagcgaaccagcagcgtcgcgtcgggccaagcgaagcagacggcacggcatctctgtcgctgcctctggacccctctcgagagttccgctccaccgttggacttgctccgctgtcggcatccagaaattgcgtggcggagcggcagacgtgagccggcacggcaggcggcctcctcctcctctcacggcaccggcagctacgggggattcctttcccaccgctccttcgctttcccttcctcgcccgccgtaataaatagacaccccctccacaccctctttccccaacctcgtgttgttcggagcgcacacacacacaaccagatctcccccaaatccacccgtcggcacctccgcttcaaggtacgccgctcgtcctcccccccccccctctctaccttctctagatcggcgttccggtccatgcatggttagggcccggtagttctacttctgttcatgtttgtgttagatccgtgtttgtgttagatccgtgctgctagcgttcgtacacggatgcgacctgtacgtcagacacgttctgattgctaacttgccagtgtttctctttggggaatcctgggatggctctagccgttccgcagacgggatcgatttcatgattttttttgtttcgttgcatagggtttggtttgcccttttcctttatttcaatatatgccgtgcacttgtttgtcgggtcatcttttcatgcttttttttgtcttggttgtgatgatgtggtctggttgggcggtcgttctagatcggagtagaattctgtttcaaactacctggtggatttattaattttggatctgtatgtgtgtgccatacatattcatagttacgaattgaagatgatggatggaaatatcgatctaggataggtatacatgttgatgcgggttttactgatgcatatacagagatgctttttgttcgcttggttgtgatgatgtggtgtggttgggcggtcgttcattcgttctagatcggagtagaatactgtttcaaactacctggtgtatttattaattttggaactgtatgtgtgtgtcatacatcttcatagttacgagtttaagatggatggaaatatcgatctaggataggtatacatgttgatgtgggttttactgatgcatatacatgatggcatatgcagcatctattcatatgctctaaccttgagtacctatctattataataaacaagtatgttttataattattttgatcttgatatacttggatgatggcatatgcagcagctatatgtggatttttttagccctgccttcatacgctatttatttgcttggtactgtttcttttgtcgatgctcaccctgttgtttggtgttacttctgcaggtcgactttaacttagcctaggatccgcccatggtcgaacaggacggcctgcatgcaggatcaccagcggcctgggtcgaaagactcttcggctacgactgggcacaacagaccatcgggtgtagcgacgcagctgttttcaggctgtccgcacagggcagacccgttttgttcgtcaaaacagacctgtctggcgcgctcaacgaactgcaagacgaggccgcaagactgagctggcttgctaccacaggcgttccttgtgctgcagtcctcgacgtcgttactgaggctggaagagactggctgctcctgggtgaagtcccaggacaggaccttttgtccagccatctggcacctgccgaaaaggtcagcatcatggcagacgccatgagaaggctgcacacactcgaccctgcaacatgccccttcgatcaccaggcaaaacacaggatcgagcgcgcaagaacgcgcatggaggctggtttggtcgaccaagatgacctcgacgaggaacaccaaggactggctcctgctgaactcttcgccagactcaaggcgagaatgccagacggtgacgacctggtcgtcacacacggcgacgcttgtctcccaaacataatggtcgagaacggacgcttcagcggtttcatcgactgcggtagactcggagtcgctgacagataccaggacatcgccctggcaacacgcgacatcgcagaggaactcggaggcgaatgggctgacaggtttctcgtgctctacggtatcgctgctccagacagccagaggatcgcattctacaggctcctcgacgagttcttttagttcgaacggtacccggggatcctctagtgccgtgggtcgtttaagctgccgctgtacctgtgtcgtctggtgccttctggtgtacctgggaggttgtcgtctatcaagtatctgtggttggtgtcatgagtcagtgagtcccaatactgttcgtgtcctgtgtgcattatacccaaaactgttatgggcaaatcatgaataagcttgatgttcgaacttaaaagtctctgctcaatatggtattatggttgtttttgttcgtctcctaatatttgcctgggatcaaattttattggctggtgttcatttgacctccatgttcttgctaggctccattttttactctacagccataatatgtttgattgtttggtttgttctttgttgtacacctggttctgtcgagcttagttttcgacactggcttacagcttaacatgttgctattttattgggttctgattgctattttattgggttctgattgctagtttttgctgaatccaaaaaccatgttatttatttaagcgatccaggttattattatgatggtggctaagtttttttttttccaagggtaaattttctggattctccagtgtttctgtggccgaattcaatcactagagtcgacctgcaggatgaggagcaatcattgttcaagacatgatgcaaagctagaaaactttgattgtggccgtccttgtgaagtttaggccggggggaacttcatgaaccctatcgaagcttaattagttcttttttgttgttagccatgtttgtattgtagttaaggtgaacaacatgacgccgcacccgcgatctcagggctcgtccccacacaggagggcacgtcgtcgtcttcgccgccgagcatcagagattcagagcacatacacgcacatctcaagcaaacggagtagtacgtcctactcctacgtacatacctagccgacgacctttatgtgcacaccaccactgctctgctgcccggcctctccgtcgtccgttcatcaccaccggatccccacccagctttcttgtacaaagtggccgttaacggatcggccagaatggcccggaccgggttaccgaattcctgcccttaaggccaattgttcaagattcattcaacaattgaaacatctcccatgattaaatcagtataaggttgctatggtcttgcttgacaaagtttttttttgagggaatttcaactaaatttttgagtgaaactatcaaatactgattttaaaaaatttttataaaaggaagcgcagagataaaaggccatctatgctacaaaagtacccaaaaatgtaatcctaaagtatgaattgcattttttttttgtttggacgaaaggaaaggagtattaccacaagaatgatatcatcttcatatttagatcttttttgggtaaagcttgagattctctaaatatagagaaatcagaagaaaaaaaaaccgtgttttggtggttttgatttctagcctccacaataactttgacggcgtcgacaagtctaacggacaccaagcagcgaaccaccagcgccgagccaagcgaagcagacggccgagacgttgacaccttcggcgcggcatctctcgagagttccgctccggcgctccacctccaccgctggcggtttcttattccgttccgttccgcctcctgctctgctcctctccacaccacacggcacgaaaccgttacggcaccggcagcacccagcacgggagaggggattcctttcccaccgttccttccctttccgccccgccgctataaatagccagccccatccccagcttttttccccaatctcatctcctctctcctgttgttcggagcacacgcacaatccgatcgatccccaaatccccttcgtctctcctcgcgagcctcgtggatcccagcttcaaggtacggcgatcgatcatcccccctccttctctctaccttcttttctctagactacatcggatggcgatccatggttagggcctgctagtttcccttcctgttttgtcgatggctgcgaggcacaatagatctgatggcgttatgacggctaacttgtcatgttgttgcgatttatagtccctttaggagatcagtttaatttctcggatggttcgagatcggtggtccatggttagtaccctaagatccgcgctgttagggttcgtagatggaggcgacctgttctgattgttaacttgtcagtacctgggaaatcctgggatggttctagctcgtccgcagatgagatcgatttcatgatcctctgtatcttgtttcgttgcctaggttccgtctaatctatccgtggtatgatgtagatgttttgatcgtgctaactacgtcttgtaaagttaattgtcaggtcataatttttagcatgcctttttttttgtttggttttgtctaattgggctgtcgttctagatcagagtagaagactgttccaaactacctgctggatttattgaacttggatctgtatgtgtgtcacatatcttcataaattcatgattaagatggattgaaatatcttttatctttttggtatggatagttctatatgttggtgtggctttgttagatgtatacatgcttagatacatgaagcaacgtgctgctactgtttagtaattgctgttcatttgtctaataaacagataaggatatgtatttatgttgctgttggttttgctggtactttgttggatacaaatgcttcaatacagaaaacagcatgctgctacgatttaccatttatctaatcttatcatatgtctaatctaataaacaaacatgcttttaaattatcttcatatgcttggatgatggcatacacagcggctatgtgtggttttttaaatacccagcatcatgggcatgcatgacactgctttaatatgctttttatttgcttgagactgtttcttttgtttatactgaccctttagttcggtgactcttctgcaggtcgactttaacttagcctaggatccatggcccagtccaagcacggcctgaccaaggagatgaccatgaagtaccgcatggagggctgcgtggacggccacaagttcgtgatcaccggcgagggcatcggctaccccttcaagggcaagcaggccatcaacctgtgcgtggtggagggcggccccttgcccttcgccgaggacatcttgtccgccgccttcatgtacggcaaccgcgtgttcaccgagtacccccaggacatcgtcgactacttcaagaactcctgccccgccggctacacctgggaccgctccttcctgttcgaggacggcgccgtgtgcatctgcaacgccgacatcaccgtgagcgtggaggagaactgcatgtaccacgagtccaagttctacggcgtgaacttccccgccgacggccccgtgatgaagaagatgaccgacaactgggagccctcctgcgagaagatcatccccgtgcccaagcagggcatcttgaagggcgacgtgagcatgtacctgctgctgaaggacggtggccgcttgcgctgccagttcgacaccgtgtacaaggccaagtccgtgccccgcaagatgcccgactggcacttcatccagcacaagctgacccgcgaggaccgcagcgacgccaagaaccagaagtggcacctgaccgagcacgccatcgcctccggctccgccttgccctccggactcagatctcgatagggtaccaatggccagttaacagatccagctgctgctgttctagggttcacaagtctgcctatttgtcttccccaatggagctatggttgtctggtctggtccttggtcgtgtcccgtttcattgtgtactatttacctgtaatgtgtatccttaagtctggtttgatggtgtctgaaacgttttgctgtggtagagcagcatggaagaactataatgaataagtgatccctaatcattgtgtccaaattttgcttctgctatacccttttgtgctgtttcttatgttttgcttaaaaatttgatctgacaaacaaatttgtctaaattatgctcttgttctgactgtgtactgtacacatttgtattgctaccggtttggcacatagttttctctttgattgcagatcaaacccttctgattgcagattgcttggctatggctgatgtgctcactgttcttctttagcttgtatattgctgatggtggcttggctacggctgaaaaagttgctgctgcgccgacttggcaactgttgctccagtaatgctttgtcctctcttcctagccgccgacttggcacttggcagctgttgctcctgtaatgcgttgttatctcttatctcttgagatgtactatgattttgaggctgtttgacttgtgccagattgccagtgctgatgctatattatctcaggtttttatgctagtatatgttttactgtgtgctgcctgtgtcgagttacgtaatctattgaaccgctatgcgtgttgatgccctgttgttgcttgccagattgatgcccctgttgcttgcagcttgcaagctgtagtgaaatcctaaaattcgaaaccaaatctattctgaacttttgaagatctgtgatgtccggaagaaaagattcaaacagataaacgggactctccagaatctataaaataaatgatcgacaaacgctttgctttggtaggcttcctagttagttagcggaccgaagcttcggtccgggcctagaaggccagcttcggccgccccgggcaactttattatacaaagttgatagataaatcagatatctggttcctaaggacccggcggaccgattaaactgattcggtccgacgcgttacctaataacttcgtatagcatacattatacgaagttattagctaactaactagtaagcgtacacctgagctgattccgatgacttcgtaggttcctagctcaagccgctcgtgtccaagcgtcacttacgattagctaatgattacggcatctaggaccgactagctaactaactagtacgtacgcgccgactagctagctaaggtaccgagctcgaattcattccgattaatcgtggcctcttgctcttcaggatgaagagctatgtttaaacgtgcaagcgctactagacaattcagtacattaaaaacgtccgcaatgtgttattaagttgtctaagcgtcaatttgtttacaccacaatatatcctgcca

SEQ ID NO: 8 - DNA, 16947 bp, Artificial sequence
  Synthetic
gtttacccgccaatatatcctgtcaaacactgcggccgcacttgaccgcggatggagccggagctgtggtgaggccatcgacgggaggtgggggagaacacagtctcagtgttctttgtgagtccgcaaggtttttagcttttctgtattaattaaggttgctgttggctgtagaatacggtcgtggaagagctgtatcggtagctactacgtaagctattatatactggaagtctggagctcgtcgatctccggtcgtcttcctccatttctcctcgtcttgctttgactgctgctaccatttgcttctgttttctgatgaagcatgccatgtcggccaccagtgtttgtgtggtttttgcagggaatggctttcaagtgctgtgattgaatggccctcgtcgtcctcggctgagctcacatggacgcgtcatgtgagtgagatatatgatcatatgatgagtggggttcgggtgagtgcgtacttgaagtaggatcccgctttcactcattcattcattggcctttaaaccgggaaattttcgcgaggagatggagggaagcaagcagggtgacgagtgcagagtgccgcgagcgctttgtcaaaaggcaccgccgtaggcaaaaaaatcaatggccctgactgactcgatggtagtactactgtagagactagagagggttgctccccatatcttcgtgtgacttttactccagcattgcatttccgtcattgagacgttaattaatagcagctttcgggacagatgactgtggccatgtttcgtcacggccgcttcgtgccagctgggggtactatagtactgtgattttgttagtaaaaactttcattaggccaccattgacgaccgggccttcgcttttgctgcgctaattaaccatttcccggcgaccgaagggaacatgaacatgccccgacacatgagggcatgaggactagtgttctccctgtcgttcgttgacttgactagtgatagtttaaacgctcttcaactggaagagcggttactaccggttcactagctagctgctaagcgactaattaactagctgtcccacggcctaactagcacttaatcccctagcctaacctaagagcgctaatctaggctagtggtcacttagggctttaagcttaagggtcacctttgtccaccaagatggaactgtcttcggccagaatggccatctggattcagcaggcctagaaggccatttatcgctatcaactttgtatagaaaagttgggccgagctcggtacggccagaatggcccggaccgggttaccaagcggccgcatcgagcagctggcttgtggggaccagacaaaaaaggaatggtgcagaattgttaggcgcacctaccaaaagcatctttgcctttattgcaaagataaagcagattcctctagtacaagtggggaacaaaataacgtggaaaagagctgtcctgacagcccactcactaatgcgtatgacgaacgcagtgacgaccacaaaactcgagcaacgagatcatgagccaatcaaagaggagtgatgtagacctaaagcaataatggagccatgacgtaagggcttacgcccatacgaaataattaaaggctgatgtgacctgtcggtctctcagaacctttactttttatgtttggcgtgtatttttaaatttccacggcaatgacgatgtgaccgtcgacccactaaaacattgctttgtcaaaagctaaaaaagatgatgcccgacagccacttgtgtgaagcatgagaagccggtccctccactaagaaaattagtgaagcatcttccagtggtccctccactcacagctcaatcagtgagcaacaggacgaaggaaatgacgtaagccatgacgtctaatcccagggcccggtgaccaatcgaattcttaccctagctccctgcggctgttacgcggtcccccatcaatcttctgttcttgcggttgtagcctgtgtaacagtgctagagtatgtatgataaataggttttaagtctgcttacatgacattttttattgtggaagagacatataaaaattagagagagtggttctcatgcaacggcggacggcccggtgctaaaagagcttcaagacaaaataatgaaacaggaagagagtagatttatctaagagccaactttattatatgaatgtgtttattgttggctttagatgatatggtaaggagttagagctaataatagataggctctattattattattattaattaaactcgctctaaggaggaaagtgggaggaagggacgaggacgaagactactggaagcatcgtgcatggatgatggatgtggtgtctcttaatgtaggtggccggaggatgtacgtgttaattgcgcgataagcactcagatccaaccgcaaactacctccacactgacacactgatagagagaaagagagacctccgacgactgccgccgcagatgagccacgtacgtatacgacgtctgccggccggctcaggctgccgccatcaccctgctcgaaagtcgcgttaggcggcgccagctacataggagtatctagtctagccagttagtatactactactgcgctgatgatgaattaactctgcatagatactgtacttgcctccctccaacacccaaccacctcctgctcggctcttaataacttggacacggatcgatgccatccaaggaagaacacgacgacgacgacggaacatccaccatgcaagcttgcatccatacgccgatacgcgtgcatccatccatccaccattatttccattttccaccgatcacacgtacacaggcctatttaaggagcgacatcccactgcaactctcctcaccactcatcaccagctagctctagcaaagcacttgccatctaccgaccgccgcattccaaacagcccgacgagctagcagagcggcaggcacctccctcctcaaggaacccatggcggccaatgcgggcggcggtggagcgggaggaggcagcggcagcggcagcgtggctgcgccggcggtgtgccgccccagcggctcgcggtggacgccgacgccggagcagatcaggatgctgaaggagctctactacggctgcggcatccggtcgcccagctcggagcagatccagcgcatcaccgccatgctgcggcagcacggcaagatcgagggcaagaacgtcttctactggttccagaaccacaaggcccgcgagcgccagaagcgccgcctcaccagcctcgacgtcaacgtgcccgccgccggcgcggccgacgccaccaccagccaactcggcgtcctctcgctgtcgtcgccgccgccttcaggcgcggcgcctccctcgcccaccctcggcttctacgccgccggcaatggcggcggatcggctgtgctgctggacacgagttccgactggggcagcagcggcgctgctatggccaccgagacatgcttcctgcaggactacatgggcgtgacggacacgggcagctcgtcgcagtggccacgcttctcgtcgtcggacacgataatggcggcggccgcggcgcgggcggcgacgacgcgggcgcccgagacgctccctctcttcccgacctgcggcgacgacggcggcagcggtagcagcagctacttgccgttctggggtgccgcgtccacaactgccggcgccacttcttccgttgcgatccaacagcaacaccagctgcaggagcagtacagcttttacagcaacagcaacagcacccagctggccggcaccggcaaccaagacgtatcggcaacagcagcagcagccgccgccctggagctgagcctcagctcatggtgctccccttaccctgctgcagggagtatgtgagagcaacgcgagctgccactgctcttcactgatgtctctggaatggaaggaggaggaagtgagaacagatcattcgacaaagcagcattagtccgttgatcggtggaagaccactcgtcagtgttgagttgaatgtttgatcaataaaatacggcaatgctgtaagggttgttttttatgccattgataatacactgtactgttcagttgttgaactctatttcttagccatgccaagtgcttttcttattttgaataacattacagcaaaaagttgaaagacaaaaaaaaaaacccccgaacagagtgctttgggtcccaagcttctttagactgtgttcggcgttccccctaaatttctccccctatatctcactcacttgtcacatcagcgttctctttccccctatatctccacgctctacagcagttccacctatatcaaacctctataccccaccacaacaatattatatactttcatcttcaactaactcatgtaccttccaatttttttctactaataattatttacgtgcacagaaacttagcaaggagagagagagcgggaatttaaatgctcggcgttaggcttttagtccgctaggtggctagaccgaggttaggacgctagttcactaggggcctagtggtgttttaagacgtcacggtcacccggtccgggcctagaaggccagcttcaagtttgtacaaaaaagcaggctccggccagaatggcccggaccgaagcttgcatgcctgcagtgcagcgtgacccggtcgtgcccctctctagagataatgagcattgcatgtctaagttataaaaaattaccacatattttttttgtcacacttgtttgaagtgcagtttatctatctttatacatatatttaaactttactctacgaataatataatctatagtactacaataatatcagtgttttagagaatcatataaatgaacagttagacatggtctaaaggacaattgagtattttgacaacaggactctacagttttatctttttagtgtgcatgtgttctcctttttttttgcaaatagcttcacctatataatacttcatccattttattagtacatccatttagggtttagggttaatggtttttatagactaatttttttagtacatctattttattctattttagcctctaaattaagaaaactaaaactctattttagtttttttatttaataatttagatataaaatagaataaaataaagtgactaaaaattaaacaaataccctttaagaaattaaaaaaactaaggaaacatttttcttgtttcgagtagataatgccagcctgttaaacgccgtcgacgagtctaacggacaccaaccagcgaaccagcagcgtcgcgtcgggccaagcgaagcagacggcacggcatctctgtcgctgcctctggacccctctcgagagttccgctccaccgttggacttgctccgctgtcggcatccagaaattgcgtggcggagcggcagacgtgagccggcacggcaggcggcctcctcctcctctcacggcaccggcagctacgggggattcctttcccaccgctccttcgctttcccttcctcgcccgccgtaataaatagacaccccctccacaccctctttccccaacctcgtgttgttcggagcgcacacacacacaaccagatctcccccaaatccacccgtcggcacctccgcttcaaggtacgccgctcgtcctcccccccccccctctctaccttctctagatcggcgttccggtccatgcatggttagggcccggtagttctacttctgttcatgtttgtgttagatccgtgtttgtgttagatccgtgctgctagcgttcgtacacggatgcgacctgtacgtcagacacgttctgattgctaacttgccagtgtttctctttggggaatcctgggatggctctagccgttccgcagacgggatcgatttcatgattttttttgtttcgttgcatagggtttggtttgcccttttcctttatttcaatatatgccgtgcacttgtttgtcgggtcatcttttcatgcttttttttgtcttggttgtgatgatgtggtctggttgggcggtcgttctagatcggagtagaattctgtttcaaactacctggtggatttattaattttggatctgtatgtgtgtgccatacatattcatagttacgaattgaagatgatggatggaaatatcgatctaggataggtatacatgttgatgcgggttttactgatgcatatacagagatgctttttgttcgcttggttgtgatgatgtggtgtggttgggcggtcgttcattcgttctagatcggagtagaatactgtttcaaactacctggtgtatttattaattttggaactgtatgtgtgtgtcatacatcttcatagttacgagtttaagatggatggaaatatcgatctaggataggtatacatgttgatgtgggttttactgatgcatatacatgatggcatatgcagcatctattcatatgctctaaccttgagtacctatctattataataaacaagtatgttttataattattttgatcttgatatacttggatgatggcatatgcagcagctatatgtggatttttttagccctgccttcatacgctatttatttgcttggtactgtttcttttgtcgatgctcaccctgttgtttggtgttacttctgcaggtcgactttaacttagcctaggatccatggcaccgaagaagaagcgcaaggtgatggacaagaagtacagcatcggcctcgacatcggcaccaactcggtgggctgggccgtcatcacggacgaatataaggtcccgtcgaagaagttcaaggtcctcggcaatacagaccgccacagcatcaagaaaaacttgatcggcgccctcctgttcgatagcggcgagaccgcggaggcgaccaggctcaagaggaccgccaggagacggtacactaggcgcaagaacaggatctgctacctgcaggagatcttcagcaacgagatggcgaaggtggacgactccttcttccaccgcctggaggaatcattcctggtggaggaggacaagaagcatgagcggcacccaatcttcggcaacatcgtcgacgaggtaagtttctgcttctacctttgatatatatataataattatcattaattagtagtaatataatatttcaaatatttttttcaaaataaaagaatgtagtatatagcaattgcttttctgtagtttataagtgtgtatattttaatttataacttttctaatatatgaccaaaacatggtgatgtgcaggtggcctaccacgagaagtacccgacaatctaccacctccggaagaaactggtggacagcacagacaaggcggacctccggctcatctaccttgccctcgcgcatatgatcaagttccgcggccacttcctcatcgagggcgacctgaacccggacaactccgacgtggacaagctgttcatccagctcgtgcagacgtacaatcaactgttcgaggagaaccccataaacgctagcggcgtggacgccaaggccatcctctcggccaggctctcgaaatcaagaaggctggagaaccttatcgcgcagttgccaggcgaaaagaagaacggcctcttcggcaaccttattgcgctcagcctcggcctgacgccgaacttcaaatcaaacttcgacctcgcggaggacgccaagctccagctctcaaaggacacctacgacgacgacctcgacaacctcctggcccagataggagaccagtacgcggacctcttcctcgccgccaagaacctctccgacgctatcctgctcagcgacatccttcgggtcaacaccgaaattaccaaggcaccgctgtccgccagcatgattaaacgctacgacgagcaccatcaggacctcacgctgctcaaggcactcgtccgccagcagctccccgagaagtacaaggagatcttcttcgaccaatcaaaaaacggctacgcgggatatatcgacggcggtgccagccaggaagagttctacaagttcatcaaaccaatcctggagaagatggacggcaccgaggagttgctggtcaagctcaacagggaggacctcctcaggaagcagaggaccttcgacaacggctccatcccgcatcagatccacctgggcgaactgcatgccatcctgcggcgccaggaggacttctacccgttcctgaaggataaccgggagaagatcgagaagatcttgacgttccgcatcccatactacgtgggcccgctggctcgcggcaactcccggttcgcctggatgacccggaagtcggaggagaccatcacaccctggaactttgaggaggtggtcgataagggcgctagcgctcagagcttcatcgagcgcatgaccaacttcgataaaaacctgcccaatgaaaaagtcctccccaagcactcgctgctctacgagtacttcaccgtgtacaacgagctcaccaaggtcaaatacgtcaccgagggcatgcggaagccggcgttcctgagcggcgagcagaagaaggcgatagtggacctcctcttcaagaccaacaggaaggtgaccgtgaagcaattaaaagaggactacttcaagaaaatagagtgcttcgactccgtggagatctcgggcgtggaggatcggttcaacgcctcactcggcacgtatcacgacctcctcaagatcattaaagacaaggacttcctcgacaacgaggagaacgaggacatcctcgaggacatcgtcctcaccctgaccctgttcgaggaccgcgaaatgatcgaggagaggctgaagacctacgcgcacctgttcgacgacaaggtcatgaaacagctcaagaggcgccgctacactggttggggaaggctgtcccgcaagctcattaatggcatcagggacaagcagagcggcaagaccatcctggacttcctcaagtccgacgggttcgccaaccgcaacttcatgcagctcattcacgacgactcgctcacgttcaaggaagacatccagaaggcacaggtgagcgggcagggtgactccctccacgaacacatcgccaacctggccggctcgccggccattaaaaagggcatcctgcagacggtcaaggtcgtcgacgagctcgtgaaggtgatgggccggcacaagcccgaaaatatcgtcatagagatggccagggagaaccagaccacccaaaaagggcagaagaactcgcgcgagcggatgaaacggatcgaggagggcattaaagagctcgggtcccagatcctgaaggagcaccccgtggaaaatacccagctccagaatgaaaagctctacctctactacctgcagaacggccgcgacatgtacgtggaccaggagctggacattaatcggctatcggactacgacgtcgaccacatcgtgccgcagtcgttcctcaaggacgatagcatcgacaacaaggtgctcacccggtcggataaaaatcggggcaagagcgacaacgtgcccagcgaggaggtcgtgaagaagatgaaaaactactggcgccagctcctcaacgcgaaactgatcacccagcgcaagttcgacaacctgacgaaggcggaacgcggtggcttgagcgaactcgataaggcgggcttcataaaaaggcagctggtcgagacgcgccagatcacgaagcatgtcgcccagatcctggacagccgcatgaatactaagtacgatgaaaacgacaagctgatccgggaggtgaaggtgatcacgctgaagtccaagctcgtgtcggacttccgcaaggacttccagttctacaaggtccgcgagatcaacaactaccaccacgcccacgacgcctacctgaatgcggtggtcgggaccgccctgatcaagaagtacccgaagctggagtcggagttcgtgtacggcgactacaaggtctacgacgtgcgcaaaatgatcgccaagtccgagcaggagatcggcaaggccacggcaaaatacttcttctactcgaacatcatgaacttcttcaagaccgagatcaccctcgcgaacggcgagatccgcaagcgcccgctcatcgaaaccaacggcgagacgggcgagatcgtctgggataagggccgggatttcgcgacggtccgcaaggtgctctccatgccgcaagtcaatatcgtgaaaaagacggaggtccagacgggcgggttcagcaaggagtccatcctcccgaagcgcaactccgacaagctcatcgcgaggaagaaggattgggacccgaaaaaatatggcggcttcgacagcccgaccgtcgcatacagcgtcctcgtcgtggcgaaggtggagaagggcaagtcaaagaagctcaagtccgtgaaggagctgctcgggatcacgattatggagcggtcctccttcgagaagaacccgatcgacttcctagaggccaagggatataaggaggtcaagaaggacctgattattaaactgccgaagtactcgctcttcgagctggaaaacggccgcaagaggatgctcgcctccgcaggcgagttgcagaagggcaacgagctcgccctcccgagcaaatacgtcaatttcctgtacctcgctagccactatgaaaagctcaagggcagcccggaggacaacgagcagaagcagctcttcgtggagcagcacaagcattacctggacgagatcatcgagcagatcagcgagttctcgaagcgggtgatcctcgccgacgcgaacctggacaaggtgctgtcggcatataacaagcaccgcgacaaaccaatacgcgagcaggccgaaaatatcatccacctcttcaccctcaccaacctcggcgctccggcagccttcaagtacttcgacaccacgattgaccggaagcggtacacgagcacgaaggaggtgctcgatgcgacgctgatccaccagagcatcacagggctctatgaaacacgcatcgacctgagccagctgggcggagacaagagaccacgggaccgccacgatggcgagctgggaggccgcaagcgggcaaggtaggtaccgccgtgggtcgtttaagctgccgctgtacctgtgtcgtctggtgccttctggtgtacctgggaggttgtcgtctatcaagtatctgtggttggtgtcatgagtcagtgagtcccaatactgttcgtgtcctgtgtgcattatacccaaaactgttatgggcaaatcatgaataagcttgatgttcgaacttaaaagtctctgctcaatatggtattatggttgtttttgttcgtctcctaatatttgcctgggatcaaattttattggctggtgttcatttgacctccatgttcttgctaggctccattttttactctacagccataatatgtttgattgtttggtttgttctttgttgtacacctggttctgtcgagcttagttttcgacactggcttacagcttaacatgttgctattttattgggttctgattgctattttattgggttctgattgctagtttttgctgaatccaaaaaccatgttatttatttaagcgatccaggttattattatgatggtggctaagtttttttttttccaagggtaaattttctggattctccagtgtttctgtggccgaattcaccggtgttaacggcaaacgctaattagtcactaggcccaggaaacactaactaagccctagcttatcctagcgcaacctagttaggtcttggttaccgtgagagtacaatgatgaacctagattaatcaatgccaaagtctgaaaaatgcaccctcagtctatgatccagaaaatcaagattgcttgaggccctgttcggttgttccggattagagccccggattaattcctagccggattacttctctaatttatatagattttgatgagctggaatgaatcctggcttattccggtacaaccgaacaggccctgaaggataccagtaatcgctgagctaaattggcatgctgtcagagtgtcagtattgcagcaaggtagtgagataaccggcatcatggtgccagtttgatggcaccattagggttagagatggtggccatgggcgcatgtcctggccaactttgtatgatatatggcagggtgaataggaaagtaaaattgtattgtaaaaagggatttcttctgtttgttagcgcatgtacaaggaatgcaagttttgagcgagggggcatcaaagatctggctgtgtttccagctgtttttgttagccccatcgaatccttgacataatgatcccgcttaaataagcaacctcgcttgtatagttccttgtgctctaacacacgatgatgataagtcgtaaaatagtggtgtccaaagaatttccaggcccagttgtaaaagctaaaatgctattcgaatttctactagcagtaagtcgtgtttagaaattatttttttatataccttttttccttctatgtacagtaggacacagtgtcagcgccgcgttgacggagaatatttgcaaaaaagtaaaagagaaagtcatagcggcgtatgtgccaaaaacttcgtcacagagagggccataagaaacatggcccacggcccaatacgaagcaccgcgacgaagcccaaacagcagtccgtaggtggagcaaagcgctgggtaatacgcaaacgttttgtcccaccttgactaatcacaagagtggagcgtaccttataaaccgagccgcaagcaccgaattgcataatgaggatcgaggatggttttagagctagaaatagcaagttaaaataaggctagtccgttatcaacttgaaaaagtggcaccgagtcggtgctttttttttgacgtctaaaaacggcccctaactaacgcttagttgcccgctagattagtcccccgttagtgcctagttagacacacgacgaactaggggctagcccgggcatcggatcccgggcacccagctttcttgtacaaagtggccgttaacggatcggccagaatggcccggaccgaagccgaggccggccacactgatagtttaaactgaaggcgggaaacgacaatctgatcatgagcggagaattaagggagtcacgttatgacccccgccgatgacgcgggacaagccgttttacgtttggaactgacagaaccgcaacgattgaaggagccactcagccgcgggtttctggagtttaatgagctaagcacatacgtcagaaaccattattgcgcgttcaaaagtcgcctaaggtcactatcagctagcaaatatttcttgtcaaaaatgctccactgacgttccataaattcccctcggtatccaattagagtctcatattcactctcccggcggatctcgactctagaggatcgctcaggaaggccgctgagatagagccatggggaggagggcgtgttgcgcgaaggaaggcgttaagagaggggcgtggacgagcaaggaggacgatgccttggccgcctacgtcaaggcccacggcgaaggcaaatggagggaagtgccccagaaagccggtttgcgtcggtgcggcaagagctgccggctgcggtggctgaactacctccggcccaacatcaggcgcggcaacatctcctacgacgaggaggatctcatcatccgcctccacaggctcctcggcaacaggtggtcgctgattgcaggcaggctgcctggccgaacagacaatgaaatcaagaactactggaacagcacgctgggccggagggcaggcgccggcgccggcgccggcggcagatccacgatggcgctttcagcttcccgagttcagcaggcggaagaactgctgcaacgacctgctgagaggcagctgatgaggagccagcttgctgcagccgccaggagcatcaactggagctacgccctcttctggtccatttcagacactcaaccaggggtgctgacgtggacggacgggttctacaacggcgaggtgaagacgcggaagatttccaactccgtggagctgacatccgaccagctcgtcatgcagaggagcgaccagctccgggagctctacgaggccctcctgtcgggcgagggcgaccgccgcgctgcgcctgcgcggccggccggctctctgtcgccggaggacctcggcgacaccgagtggtactacgtggtgtccatgacctacgccttccggccaggccaagggttgcccggcaggagtttcgcgagcgacgagcatgtctggctgtgcaacgcgcacctcgccggcagcaaagccttcccccgcgcgctcctcgccaagagcgcgtccattcagtcaatcctctgcatcccggttatgggcggcgtgcttgagcttggtacaactgacacggtgccggaggccccggacttggtcagccgagcaaccgcggctttctgggagccgcagtgcccgagctccagcccgtcaggacgagcaaacgagacgggcgaggccgcagcagacgacggcacgtttgcgttcgaggaactcgaccacaataatggcatggacgacatagaggcgatgaccgccgccgggggacacgggcaggaggaggagctaagactaagagaagccgaggccctgtcagacgacgcaagcctggagcacatcaccaaggagatcgaggagttctacagcctctgcgacgaaatggacctgcaggcgctaccactaccgctagaggacggctggaccgtggacgcgtccaatttcgaggtcccctgctcttccccgcagccagcgccgcctccggtggatagggctaccgctaacgtcgccgccgacgcctcaagggcacccgtctacggctctcgcgcgacgagtttcatggcttggacgaggtcctcgcagcagtcgtcgtgctccgacgacgcggcgcccgcagcagtagtgccggccatcgaggagccgcagagattgctgaagaaagtggtggccggcggcggtgcttgggagagctgtggcggcgcgacgggagcagcacaggaaatgagtggcactggcaccaagaaccacgtcatgtcggagcgaaagcgacgagagaagctcaacgagatgttcctcgtcctcaagtcactgcttccgtccattcacagggtgaacaaagcgtcgatcctcgccgaaacgatagcctacctcaaggagcttcagagaagggtgcaagagctggagtccagtagggaacctgcgtcgcgcccatccgaaacgacgacaaggctaataacaaggccctcccgtggcaataatgagagtgtgaggaaggaggtctgcgcgggctccaagaggaagagcccagagctcggcagagacgacgtggagcgccccccggtcctcacgatggacgccggcaccagcaacgtcaccgtcaccgtctcggacaaggatgtgctcctggaggtgcagtgccggtgggaggagctcctgatgacgcgagtgttcgacgccatcaagagcctccatttggacgtcctctcggttcaggcttcagcgccagatggcttcatggggcttaagatacgagctcagtttgctggctccggtgccgtcgtgccctggatgatcagcgaggctcttcgcaaagctatagggaacccctgggtcgtcgtcgcgccggacaccggctcgcacgccaccccggccgcgacgtcgggcgcctgcgagacgggccagaatagcgccgctcatcgcgcggaccccgactcagccgggacgacgacgacctcggcggcggcggtgtgggcgcccaaggccgtgcggtgcacgggcggactcttcttcttccaccgggacacgacgccggcgcacgcgggcgagacggcgacgccaatggccggtggaggtggaggaggaggaggagaagcagggtcgtcggacgactgcagctcggcggcgtcggtatcgcttcgcgtcggaagccacgacgagccgtgcttctccggcgacggtgacggcgactggatggacgacgtgagggccctggcgtcgtttctggagtccgacgaggactggctccgctgtcagacggccgggcagcttgcgtagtggccaggtaccactaactatctatactgtaataatgttgtatagccgccggatagctagctagtttagtcattcagcggcgatgggtaataataaagtgtcatccatccatcaccatgcgtggcaacgtgagcaatgacctgattgaacaaattgaaatgaaaagaagaaatatgttatatgtcaacgagatttcctcataatgccactgacgacgtgtgtccaagaaatgtatcagtgatacgtatattcacaatttttttatgacttatactcacaatttgtttttttactacttatactcacaatttgttgtgcgtaccataacaatttcgatcgaatatatatcagaaagttgacgaaagtaagctcactcaaaaagttaaatgggctgcggaagctgcgtcaggcccaagttttggctattctatccggtatccacgattttgatggctgagggacatatgttcgcttaagcttggcgcgccggtcacccggtccgggcctagaaggccagcttcggccgccccgggcaactttattatacaaagttgatagataaatcagatatctggttcctaaggacccgtgtacacctgagcctaactaactaggcctctaacacgctaaccccttagagagttcctaacgccctagactagttcaataagtcggcctaactaaactggctaacggtaccgagctcgaattcattccgattaatcgtggcctcttgctcttcaggatgaagagctatgtttaaacgtgcaagcgctactagacaattcagtacattaaaaacgtccgcaatgtgttattaagttgtctaagcgtcaatttgtttacaccacaatatatcctgcca

SEQ ID NO: 9 - DNA, 15750 bp, Artificial sequence
  Synthetic
gtttacccgccaatatatcctgtcaaacactgcggccgcacttgaccgcggatggagccggagctgtggtgaggccatcgacgggaggtgggggagaacacagtctcagtgttctttgtgagtccgcaaggtttttagcttttctgtattaattaaggttgctgttggctgtagaatacggtcgtggaagagctgtatcggtagctactacgtaagctattatatactggaagtctggagctcgtcgatctccggtcgtcttcctccatttctcctcgtcttgctttgactgctgctaccatttgcttctgttttctgatgaagcatgccatgtcggccaccagtgtttgtgtggtttttgcagggaatggctttcaagtgctgtgattgaatggccctcgtcgtcctcggctgagctcacatggacgcgtcatgtgagtgagatatatgatcatatgatgagtggggttcgggtgagtgcgtacttgaagtaggatcccgctttcactcattcattcattggcctttaaaccgggaaattttcgcgaggagatggagggaagcaagcagggtgacgagtgcagagtgccgcgagcgctttgtcaaaaggcaccgccgtaggcaaaaaaatcaatggccctgactgactcgatggtagtactactgtagagactagagagggttgctccccatatcttcgtgtgacttttactccagcattgcatttccgtcattgagacgttaattaatagcagctttcgggacagatgactgtggccatgtttcgtcacggccgcttcgtgccagctgggggtactatagtactgtgattttgttagtaaaaactttcattaggccaccattgacgaccgggccttcgcttttgctgcgctaattaaccatttcccggcgaccgaagggaacatgaacatgccccgacacatgagggcatgaggactagtgttctccctgtcgttcgttgacttgactagtgatagtttaaacgctcttcaactggaagagcggttactaccggttcactagctagctgctaagcgactaattaactagctgtcccacggcctaactagcacttaatcccctagcctaacctaagagcgctaatctaggctagtggtcacttagggctttaagcttaagggtcacctttgtccaccaagatggaactgtcttcggccagaatggccatctggattcagcaggcctagaaggccatttatcgctatcaactttgtatagaaaagttgggccgagctcggtacggccagaatggcccggaccgggttaccaagcggccgcatcgagcagctggcttgtggggaccagacaaaaaaggaatggtgcagaattgttaggcgcacctaccaaaagcatctttgcctttattgcaaagataaagcagattcctctagtacaagtggggaacaaaataacgtggaaaagagctgtcctgacagcccactcactaatgcgtatgacgaacgcagtgacgaccacaaaactcgagcaacgagatcatgagccaatcaaagaggagtgatgtagacctaaagcaataatggagccatgacgtaagggcttacgcccatacgaaataattaaaggctgatgtgacctgtcggtctctcagaacctttactttttatgtttggcgtgtatttttaaatttccacggcaatgacgatgtgaccgtcgacccactaaaacattgctttgtcaaaagctaaaaaagatgatgcccgacagccacttgtgtgaagcatgagaagccggtccctccactaagaaaattagtgaagcatcttccagtggtccctccactcacagctcaatcagtgagcaacaggacgaaggaaatgacgtaagccatgacgtctaatcccagggcccggtgaccaatcgaattcttaccctagctccctgcggctgttacgcggtcccccatcaatcttctgttcttgcggttgtagcctgtgtaacagtgctagagtatgtatgataaataggttttaagtctgcttacatgacattttttattgtggaagagacatataaaaattagagagagtggttctcatgcaacggcggacggcccggtgctaaaagagcttcaagacaaaataatgaaacaggaagagagtagatttatctaagagccaactttattatatgaatgtgtttattgttggctttagatgatatggtaaggagttagagctaataatagataggctctattattattattattaattaaactcgctctaaggaggaaagtgggaggaagggacgaggacgaagactactggaagcatcgtgcatggatgatggatgtggtgtctcttaatgtaggtggccggaggatgtacgtgttaattgcgcgataagcactcagatccaaccgcaaactacctccacactgacacactgatagagagaaagagagacctccgacgactgccgccgcagatgagccacgtacgtatacgacgtctgccggccggctcaggctgccgccatcaccctgctcgaaagtcgcgttaggcggcgccagctacataggagtatctagtctagccagttagtatactactactgcgctgatgatgaattaactctgcatagatactgtacttgcctccctccaacacccaaccacctcctgctcggctcttaataacttggacacggatcgatgccatccaaggaagaacacgacgacgacgacggaacatccaccatgcaagcttgcatccatacgccgatacgcgtgcatccatccatccaccattatttccattttccaccgatcacacgtacacaggcctatttaaggagcgacatcccactgcaactctcctcaccactcatcaccagctagctctagcaaagcacttgccatctaccgaccgccgcattccaaacagcccgacgagctagcagagcggcaggcacctccctcctcaaggaacccatggcggccaatgcgggcggcggtggagcgggaggaggcagcggcagcggcagcgtggctgcgccggcggtgtgccgccccagcggctcgcggtggacgccgacgccggagcagatcaggatgctgaaggagctctactacggctgcggcatccggtcgcccagctcggagcagatccagcgcatcaccgccatgctgcggcagcacggcaagatcgagggcaagaacgtcttctactggttccagaaccacaaggcccgcgagcgccagaagcgccgcctcaccagcctcgacgtcaacgtgcccgccgccggcgcggccgacgccaccaccagccaactcggcgtcctctcgctgtcgtcgccgccgccttcaggcgcggcgcctccctcgcccaccctcggcttctacgccgccggcaatggcggcggatcggctgtgctgctggacacgagttccgactggggcagcagcggcgctgctatggccaccgagacatgcttcctgcaggactacatgggcgtgacggacacgggcagctcgtcgcagtggccacgcttctcgtcgtcggacacgataatggcggcggccgcggcgcgggcggcgacgacgcgggcgcccgagacgctccctctcttcccgacctgcggcgacgacggcggcagcggtagcagcagctacttgccgttctggggtgccgcgtccacaactgccggcgccacttcttccgttgcgatccaacagcaacaccagctgcaggagcagtacagcttttacagcaacagcaacagcacccagctggccggcaccggcaaccaagacgtatcggcaacagcagcagcagccgccgccctggagctgagcctcagctcatggtgctccccttaccctgctgcagggagtatgtgagagcaacgcgagctgccactgctcttcactgatgtctctggaatggaaggaggaggaagtgagaacagatcattcgacaaagcagcattagtccgttgatcggtggaagaccactcgtcagtgttgagttgaatgtttgatcaataaaatacggcaatgctgtaagggttgttttttatgccattgataatacactgtactgttcagttgttgaactctatttcttagccatgccaagtgcttttcttattttgaataacattacagcaaaaagttgaaagacaaaaaaaaaaacccccgaacagagtgctttgggtcccaagcttctttagactgtgttcggcgttccccctaaatttctccccctatatctcactcacttgtcacatcagcgttctctttccccctatatctccacgctctacagcagttccacctatatcaaacctctataccccaccacaacaatattatatactttcatcttcaactaactcatgtaccttccaatttttttctactaataattatttacgtgcacagaaacttagcaaggagagagagagcgggaatttaaatgctcggcgttaggcttttagtccgctaggtggctagaccgaggttaggacgctagttcactaggggcctagtggtgttttaagacgtcacggtcacccggtccgggcctagaaggccagcttcaagtttgtacaaaaaagcaggctccggccagaatggcccggaccgaagcttgcatgcctgcagtgcagcgtgacccggtcgtgcccctctctagagataatgagcattgcatgtctaagttataaaaaattaccacatattttttttgtcacacttgtttgaagtgcagtttatctatctttatacatatatttaaactttactctacgaataatataatctatagtactacaataatatcagtgttttagagaatcatataaatgaacagttagacatggtctaaaggacaattgagtattttgacaacaggactctacagttttatctttttagtgtgcatgtgttctcctttttttttgcaaatagcttcacctatataatacttcatccattttattagtacatccatttagggtttagggttaatggtttttatagactaatttttttagtacatctattttattctattttagcctctaaattaagaaaactaaaactctattttagtttttttatttaataatttagatataaaatagaataaaataaagtgactaaaaattaaacaaataccctttaagaaattaaaaaaactaaggaaacatttttcttgtttcgagtagataatgccagcctgttaaacgccgtcgacgagtctaacggacaccaaccagcgaaccagcagcgtcgcgtcgggccaagcgaagcagacggcacggcatctctgtcgctgcctctggacccctctcgagagttccgctccaccgttggacttgctccgctgtcggcatccagaaattgcgtggcggagcggcagacgtgagccggcacggcaggcggcctcctcctcctctcacggcaccggcagctacgggggattcctttcccaccgctccttcgctttcccttcctcgcccgccgtaataaatagacaccccctccacaccctctttccccaacctcgtgttgttcggagcgcacacacacacaaccagatctcccccaaatccacccgtcggcacctccgcttcaaggtacgccgctcgtcctcccccccccccctctctaccttctctagatcggcgttccggtccatgcatggttagggcccggtagttctacttctgttcatgtttgtgttagatccgtgtttgtgttagatccgtgctgctagcgttcgtacacggatgcgacctgtacgtcagacacgttctgattgctaacttgccagtgtttctctttggggaatcctgggatggctctagccgttccgcagacgggatcgatttcatgattttttttgtttcgttgcatagggtttggtttgcccttttcctttatttcaatatatgccgtgcacttgtttgtcgggtcatcttttcatgcttttttttgtcttggttgtgatgatgtggtctggttgggcggtcgttctagatcggagtagaattctgtttcaaactacctggtggatttattaattttggatctgtatgtgtgtgccatacatattcatagttacgaattgaagatgatggatggaaatatcgatctaggataggtatacatgttgatgcgggttttactgatgcatatacagagatgctttttgttcgcttggttgtgatgatgtggtgtggttgggcggtcgttcattcgttctagatcggagtagaatactgtttcaaactacctggtgtatttattaattttggaactgtatgtgtgtgtcatacatcttcatagttacgagtttaagatggatggaaatatcgatctaggataggtatacatgttgatgtgggttttactgatgcatatacatgatggcatatgcagcatctattcatatgctctaaccttgagtacctatctattataataaacaagtatgttttataattattttgatcttgatatacttggatgatggcatatgcagcagctatatgtggatttttttagccctgccttcatacgctatttatttgcttggtactgtttcttttgtcgatgctcaccctgttgtttggtgttacttctgcaggtcgactttaacttagcctaggatccatggcaccgaagaagaagcgcaaggtgatggacaagaagtacagcatcggcctcgacatcggcaccaactcggtgggctgggccgtcatcacggacgaatataaggtcccgtcgaagaagttcaaggtcctcggcaatacagaccgccacagcatcaagaaaaacttgatcggcgccctcctgttcgatagcggcgagaccgcggaggcgaccaggctcaagaggaccgccaggagacggtacactaggcgcaagaacaggatctgctacctgcaggagatcttcagcaacgagatggcgaaggtggacgactccttcttccaccgcctggaggaatcattcctggtggaggaggacaagaagcatgagcggcacccaatcttcggcaacatcgtcgacgaggtaagtttctgcttctacctttgatatatatataataattatcattaattagtagtaatataatatttcaaatatttttttcaaaataaaagaatgtagtatatagcaattgcttttctgtagtttataagtgtgtatattttaatttataacttttctaatatatgaccaaaacatggtgatgtgcaggtggcctaccacgagaagtacccgacaatctaccacctccggaagaaactggtggacagcacagacaaggcggacctccggctcatctaccttgccctcgcgcatatgatcaagttccgcggccacttcctcatcgagggcgacctgaacccggacaactccgacgtggacaagctgttcatccagctcgtgcagacgtacaatcaactgttcgaggagaaccccataaacgctagcggcgtggacgccaaggccatcctctcggccaggctctcgaaatcaagaaggctggagaaccttatcgcgcagttgccaggcgaaaagaagaacggcctcttcggcaaccttattgcgctcagcctcggcctgacgccgaacttcaaatcaaacttcgacctcgcggaggacgccaagctccagctctcaaaggacacctacgacgacgacctcgacaacctcctggcccagataggagaccagtacgcggacctcttcctcgccgccaagaacctctccgacgctatcctgctcagcgacatccttcgggtcaacaccgaaattaccaaggcaccgctgtccgccagcatgattaaacgctacgacgagcaccatcaggacctcacgctgctcaaggcactcgtccgccagcagctccccgagaagtacaaggagatcttcttcgaccaatcaaaaaacggctacgcgggatatatcgacggcggtgccagccaggaagagttctacaagttcatcaaaccaatcctggagaagatggacggcaccgaggagttgctggtcaagctcaacagggaggacctcctcaggaagcagaggaccttcgacaacggctccatcccgcatcagatccacctgggcgaactgcatgccatcctgcggcgccaggaggacttctacccgttcctgaaggataaccgggagaagatcgagaagatcttgacgttccgcatcccatactacgtgggcccgctggctcgcggcaactcccggttcgcctggatgacccggaagtcggaggagaccatcacaccctggaactttgaggaggtggtcgataagggcgctagcgctcagagcttcatcgagcgcatgaccaacttcgataaaaacctgcccaatgaaaaagtcctccccaagcactcgctgctctacgagtacttcaccgtgtacaacgagctcaccaaggtcaaatacgtcaccgagggcatgcggaagccggcgttcctgagcggcgagcagaagaaggcgatagtggacctcctcttcaagaccaacaggaaggtgaccgtgaagcaattaaaagaggactacttcaagaaaatagagtgcttcgactccgtggagatctcgggcgtggaggatcggttcaacgcctcactcggcacgtatcacgacctcctcaagatcattaaagacaaggacttcctcgacaacgaggagaacgaggacatcctcgaggacatcgtcctcaccctgaccctgttcgaggaccgcgaaatgatcgaggagaggctgaagacctacgcgcacctgttcgacgacaaggtcatgaaacagctcaagaggcgccgctacactggttggggaaggctgtcccgcaagctcattaatggcatcagggacaagcagagcggcaagaccatcctggacttcctcaagtccgacgggttcgccaaccgcaacttcatgcagctcattcacgacgactcgctcacgttcaaggaagacatccagaaggcacaggtgagcgggcagggtgactccctccacgaacacatcgccaacctggccggctcgccggccattaaaaagggcatcctgcagacggtcaaggtcgtcgacgagctcgtgaaggtgatgggccggcacaagcccgaaaatatcgtcatagagatggccagggagaaccagaccacccaaaaagggcagaagaactcgcgcgagcggatgaaacggatcgaggagggcattaaagagctcgggtcccagatcctgaaggagcaccccgtggaaaatacccagctccagaatgaaaagctctacctctactacctgcagaacggccgcgacatgtacgtggaccaggagctggacattaatcggctatcggactacgacgtcgaccacatcgtgccgcagtcgttcctcaaggacgatagcatcgacaacaaggtgctcacccggtcggataaaaatcggggcaagagcgacaacgtgcccagcgaggaggtcgtgaagaagatgaaaaactactggcgccagctcctcaacgcgaaactgatcacccagcgcaagttcgacaacctgacgaaggcggaacgcggtggcttgagcgaactcgataaggcgggcttcataaaaaggcagctggtcgagacgcgccagatcacgaagcatgtcgcccagatcctggacagccgcatgaatactaagtacgatgaaaacgacaagctgatccgggaggtgaaggtgatcacgctgaagtccaagctcgtgtcggacttccgcaaggacttccagttctacaaggtccgcgagatcaacaactaccaccacgcccacgacgcctacctgaatgcggtggtcgggaccgccctgatcaagaagtacccgaagctggagtcggagttcgtgtacggcgactacaaggtctacgacgtgcgcaaaatgatcgccaagtccgagcaggagatcggcaaggccacggcaaaatacttcttctactcgaacatcatgaacttcttcaagaccgagatcaccctcgcgaacggcgagatccgcaagcgcccgctcatcgaaaccaacggcgagacgggcgagatcgtctgggataagggccgggatttcgcgacggtccgcaaggtgctctccatgccgcaagtcaatatcgtgaaaaagacggaggtccagacgggcgggttcagcaaggagtccatcctcccgaagcgcaactccgacaagctcatcgcgaggaagaaggattgggacccgaaaaaatatggcggcttcgacagcccgaccgtcgcatacagcgtcctcgtcgtggcgaaggtggagaagggcaagtcaaagaagctcaagtccgtgaaggagctgctcgggatcacgattatggagcggtcctccttcgagaagaacccgatcgacttcctagaggccaagggatataaggaggtcaagaaggacctgattattaaactgccgaagtactcgctcttcgagctggaaaacggccgcaagaggatgctcgcctccgcaggcgagttgcagaagggcaacgagctcgccctcccgagcaaatacgtcaatttcctgtacctcgctagccactatgaaaagctcaagggcagcccggaggacaacgagcagaagcagctcttcgtggagcagcacaagcattacctggacgagatcatcgagcagatcagcgagttctcgaagcgggtgatcctcgccgacgcgaacctggacaaggtgctgtcggcatataacaagcaccgcgacaaaccaatacgcgagcaggccgaaaatatcatccacctcttcaccctcaccaacctcggcgctccggcagccttcaagtacttcgacaccacgattgaccggaagcggtacacgagcacgaaggaggtgctcgatgcgacgctgatccaccagagcatcacagggctctatgaaacacgcatcgacctgagccagctgggcggagacaagagaccacgggaccgccacgatggcgagctgggaggccgcaagcgggcaaggtaggtaccgccgtgggtcgtttaagctgccgctgtacctgtgtcgtctggtgccttctggtgtacctgggaggttgtcgtctatcaagtatctgtggttggtgtcatgagtcagtgagtcccaatactgttcgtgtcctgtgtgcattatacccaaaactgttatgggcaaatcatgaataagcttgatgttcgaacttaaaagtctctgctcaatatggtattatggttgtttttgttcgtctcctaatatttgcctgggatcaaattttattggctggtgttcatttgacctccatgttcttgctaggctccattttttactctacagccataatatgtttgattgtttggtttgttctttgttgtacacctggttctgtcgagcttagttttcgacactggcttacagcttaacatgttgctattttattgggttctgattgctattttattgggttctgattgctagtttttgctgaatccaaaaaccatgttatttatttaagcgatccaggttattattatgatggtggctaagtttttttttttccaagggtaaattttctggattctccagtgtttctgtggccgaattcaccggtgttaacggcaaacgctaattagtcactaggcccaggaaacactaactaagccctagcttatcctagcgcaacctagttaggtcttggttaccggcctagaaggccgatctcccgggcacccagctttcttgtacaaagtggccgttaacggatcggccagaatggcccggaccgaagccgaggccggccacactgatagtttaaactgaaggcgggaaacgacaatctgatcatgagcggagaattaagggagtcacgttatgacccccgccgatgacgcgggacaagccgttttacgtttggaactgacagaaccgcaacgattgaaggagccactcagccgcgggtttctggagtttaatgagctaagcacatacgtcagaaaccattattgcgcgttcaaaagtcgcctaaggtcactatcagctagcaaatatttcttgtcaaaaatgctccactgacgttccataaattcccctcggtatccaattagagtctcatattcactctcccggcggatctcgactctagaggatcgctcaggaaggccgctgagatagagccatggggaggagggcgtgttgcgcgaaggaaggcgttaagagaggggcgtggacgagcaaggaggacgatgccttggccgcctacgtcaaggcccacggcgaaggcaaatggagggaagtgccccagaaagccggtttgcgtcggtgcggcaagagctgccggctgcggtggctgaactacctccggcccaacatcaggcgcggcaacatctcctacgacgaggaggatctcatcatccgcctccacaggctcctcggcaacaggtggtcgctgattgcaggcaggctgcctggccgaacagacaatgaaatcaagaactactggaacagcacgctgggccggagggcaggcgccggcgccggcgccggcggcagatccacgatggcgctttcagcttcccgagttcagcaggcggaagaactgctgcaacgacctgctgagaggcagctgatgaggagccagcttgctgcagccgccaggagcatcaactggagctacgccctcttctggtccatttcagacactcaaccaggggtgctgacgtggacggacgggttctacaacggcgaggtgaagacgcggaagatttccaactccgtggagctgacatccgaccagctcgtcatgcagaggagcgaccagctccgggagctctacgaggccctcctgtcgggcgagggcgaccgccgcgctgcgcctgcgcggccggccggctctctgtcgccggaggacctcggcgacaccgagtggtactacgtggtgtccatgacctacgccttccggccaggccaagggttgcccggcaggagtttcgcgagcgacgagcatgtctggctgtgcaacgcgcacctcgccggcagcaaagccttcccccgcgcgctcctcgccaagagcgcgtccattcagtcaatcctctgcatcccggttatgggcggcgtgcttgagcttggtacaactgacacggtgccggaggccccggacttggtcagccgagcaaccgcggctttctgggagccgcagtgcccgagctccagcccgtcaggacgagcaaacgagacgggcgaggccgcagcagacgacggcacgtttgcgttcgaggaactcgaccacaataatggcatggacgacatagaggcgatgaccgccgccgggggacacgggcaggaggaggagctaagactaagagaagccgaggccctgtcagacgacgcaagcctggagcacatcaccaaggagatcgaggagttctacagcctctgcgacgaaatggacctgcaggcgctaccactaccgctagaggacggctggaccgtggacgcgtccaatttcgaggtcccctgctcttccccgcagccagcgccgcctccggtggatagggctaccgctaacgtcgccgccgacgcctcaagggcacccgtctacggctctcgcgcgacgagtttcatggcttggacgaggtcctcgcagcagtcgtcgtgctccgacgacgcggcgcccgcagcagtagtgccggccatcgaggagccgcagagattgctgaagaaagtggtggccggcggcggtgcttgggagagctgtggcggcgcgacgggagcagcacaggaaatgagtggcactggcaccaagaaccacgtcatgtcggagcgaaagcgacgagagaagctcaacgagatgttcctcgtcctcaagtcactgcttccgtccattcacagggtgaacaaagcgtcgatcctcgccgaaacgatagcctacctcaaggagcttcagagaagggtgcaagagctggagtccagtagggaacctgcgtcgcgcccatccgaaacgacgacaaggctaataacaaggccctcccgtggcaataatgagagtgtgaggaaggaggtctgcgcgggctccaagaggaagagcccagagctcggcagagacgacgtggagcgccccccggtcctcacgatggacgccggcaccagcaacgtcaccgtcaccgtctcggacaaggatgtgctcctggaggtgcagtgccggtgggaggagctcctgatgacgcgagtgttcgacgccatcaagagcctccatttggacgtcctctcggttcaggcttcagcgccagatggcttcatggggcttaagatacgagctcagtttgctggctccggtgccgtcgtgccctggatgatcagcgaggctcttcgcaaagctatagggaacccctgggtcgtcgtcgcgccggacaccggctcgcacgccaccccggccgcgacgtcgggcgcctgcgagacgggccagaatagcgccgctcatcgcgcggaccccgactcagccgggacgacgacgacctcggcggcggcggtgtgggcgcccaaggccgtgcggtgcacgggcggactcttcttcttccaccgggacacgacgccggcgcacgcgggcgagacggcgacgccaatggccggtggaggtggaggaggaggaggagaagcagggtcgtcggacgactgcagctcggcggcgtcggtatcgcttcgcgtcggaagccacgacgagccgtgcttctccggcgacggtgacggcgactggatggacgacgtgagggccctggcgtcgtttctggagtccgacgaggactggctccgctgtcagacggccgggcagcttgcgtagtggccaggtaccactaactatctatactgtaataatgttgtatagccgccggatagctagctagtttagtcattcagcggcgatgggtaataataaagtgtcatccatccatcaccatgcgtggcaacgtgagcaatgacctgattgaacaaattgaaatgaaaagaagaaatatgttatatgtcaacgagatttcctcataatgccactgacgacgtgtgtccaagaaatgtatcagtgatacgtatattcacaatttttttatgacttatactcacaatttgtttttttactacttatactcacaatttgttgtgcgtaccataacaatttcgatcgaatatatatcagaaagttgacgaaagtaagctcactcaaaaagttaaatgggctgcggaagctgcgtcaggcccaagttttggctattctatccggtatccacgattttgatggctgagggacatatgttcgcttaagcttggcgcgccggtcacccggtccgggcctagaaggccagcttcggccgccccgggcaactttattatacaaagttgatagataaatcagatatctggttcctaaggacccgtgtacacctgagcctaactaactaggcctctaacacgctaaccccttagagagttcctaacgccctagactagttcaataagtcggcctaactaaactggctaacggtaccgagctcgaattcattccgattaatcgtggcctcttgctcttcaggatgaagagctatgtttaaacgtgcaagcgctactagacaattcagtacattaaaaacgtccgcaatgtgttattaagttgtctaagcgtcaatttgtttacaccacaatatatcctgcca

SEQ ID NO: 10 - DNA, 11183 bp, Artificial sequence
  Synthetic
gtttacccgccaatatatcctgtcaaacactgcggccgcacttgaccgcggatggagccggagctgtggtgaggccatcgacgggaggtgggggagaacacagtctcagtgttctttgtgagtccgcaaggtttttagcttttctgtattaattaaggttgctgttggctgtagaatacggtcgtggaagagctgtatcggtagctactacgtaagctattatatactggaagtctggagctcgtcgatctccggtcgtcttcctccatttctcctcgtcttgctttgactgctgctaccatttgcttctgttttctgatgaagcatgccatgtcggccaccagtgtttgtgtggtttttgcagggaatggctttcaagtgctgtgattgaatggccctcgtcgtcctcggctgagctcacatggacgcgtcatgtgagtgagatatatgatcatatgatgagtggggttcgggtgagtgcgtacttgaagtaggatcccgctttcactcattcattcattggcctttaaaccgggaaattttcgcgaggagatggagggaagcaagcagggtgacgagtgcagagtgccgcgagcgctttgtcaaaaggcaccgccgtaggcaaaaaaatcaatggccctgactgactcgatggtagtactactgtagagactagagagggttgctccccatatcttcgtgtgacttttactccagcattgcatttccgtcattgagacgttaattaatagcagctttcgggacagatgactgtggccatgtttcgtcacggccgcttcgtgccagctgggggtactatagtactgtgattttgttagtaaaaactttcattaggccaccattgacgaccgggccttcgcttttgctgcgctaattaaccatttcccggcgaccgaagggaacatgaacatgccccgacacatgagggcatgaggactagtgttctccctgtcgttcgttgacttgactagtgatagtttaaacgctcttcaactggaagagcggttactaccggttcactagctagctgctaatcgagctagttaccctatgaggtgacatgaagcgctcacggttactatgacggttagcttcacgactgttggtggcagtagcgtacgacttagctatagttccggacttacccttaagataacttcgtatagcatacattatacgaagttatgggcccacgcgtgaagagcggttaccagagctggtcacctttgtccaccaagatggaactgtcttcggccagaatggccatctggattcagcaggcctagaaggccatttatcgctatcaactttgtatagaaaagttgggccagaatggcccggaccgggttaccgaattcgagctcggtaccctgggatccgatatcgatgggccctggccgaagctttgagagtacaatgatgaacctagattaatcaatgccaaagtctgaaaaatgcaccctcagtctatgatccagaaaatcaagattgcttgaggccctgttcggttgttccggattagagccccggattaattcctagccggattacttctctaatttatatagattttgatgagctggaatgaatcctggcttattccggtacaaccgaacaggccctgaaggataccagtaatcgctgagctaaattggcatgctgtcagagtgtcagtattgcagcaaggtagtgagataaccggcatcatggtgccagtttgatggcaccattagggttagagatggtggccatgggcgcatgtcctggccaactttgtatgatatatggcagggtgaataggaaagtaaaattgtattgtaaaaagggatttcttctgtttgttagcgcatgtacaaggaatgcaagttttgagcgagggggcatcaaagatctggctgtgtttccagctgtttttgttagccccatcgaatccttgacataatgatcccgcttaaataagcaacctcgcttgtatagttccttgtgctctaacacacgatgatgataagtcgtaaaatagtggtgtccaaagaatttccaggcccagttgtaaaagctaaaatgctattcgaatttctactagcagtaagtcgtgtttagaaattatttttttatataccttttttccttctatgtacagtaggacacagtgtcagcgccgcgttgacggagaatatttgcaaaaaagtaaaagagaaagtcatagcggcgtatgtgccaaaaacttcgtcacagagagggccataagaaacatggcccacggcccaatacgaagcaccgcgacgaagcccaaacagcagtccgtaggtggagcaaagcgctgggtaatacgcaaacgttttgtcccaccttgactaatcacaagagtggagcgtaccttataaaccgagccgcaagcaccgaattgcataatgaggatcgaggatggttttagagctagaaatagcaagttaaaataaggctagtccgttatcaacttgaaaaagtggcaccgagtcggtgctttttttttgcggccgcgaattcctgcagggtctaaaaacggcccctaactaacgcttagttgcccgctagattagtcccccgttagtgcctagttagacacacgacgaactaggggctagcggccgcggaaaaccgtcgacctcgagagcatgcacggatagatggcgtctagcatatcgataggacatgacaagtggtacgatccccgtcacatgtccatggaggcatctgatatggacacggcgtgtatctatcgcggctggaacagaaccagcgctcgcgcggcggtcggcgggagggacagaccttggctccgtgcgttcaggttgtgcttgtgccgcgcgccacgcacggtctccgccgcctgcagctgaaattttagatttacatcctatccctttattttttttatttgtcacaattcagttcaaaaatgaagaacggaggtagtgcatcctttgtgagactaatgaaaatcacatctggatcctgaaatcggcgtcgtaacctacaaggccacggactggattagatagtggtccatggtgcataatgaggatcgaggcacggttacccggaccgaagcttgcatgcctgcagtgcagcgtgacccggtcgtgcccctctctagagataatgagcattgcatgtctaagttataaaaaattaccacatattttttttgtcacacttgtttgaagtgcagtttatctatctttatacatatatttaaactttactctacgaataatataatctatagtactacaataatatcagtgttttagagaatcatataaatgaacagttagacatggtctaaaggacaattgagtattttgacaacaggactctacagttttatctttttagtgtgcatgtgttctcctttttttttgcaaatagcttcacctatataatacttcatccattttattagtacatccatttagggtttagggttaatggtttttatagactaatttttttagtacatctattttattctattttagcctctaaattaagaaaactaaaactctattttagtttttttatttaataatttagatataaaatagaataaaataaagtgactaaaaattaaacaaataccctttaagaaattaaaaaaactaaggaaacatttttcttgtttcgagtagataatgccagcctgttaaacgccgtcgacgagtctaacggacaccaaccagcgaaccagcagcgtcgcgtcgggccaagcgaagcagacggcacggcatctctgtcgctgcctctggacccctctcgagagttccgctccaccgttggacttgctccgctgtcggcatccagaaattgcgtggcggagcggcagacgtgagccggcacggcaggcggcctcctcctcctctcacggcaccggcagctacgggggattcctttcccaccgctccttcgctttcccttcctcgcccgccgtaataaatagacaccccctccacaccctctttccccaacctcgtgttgttcggagcgcacacacacacaaccagatctcccccaaatccacccgtcggcacctccgcttcaaggtacgccgctcgtcctcccccccccccctctctaccttctctagatcggcgttccggtccatgcatggttagggcccggtagttctacttctgttcatgtttgtgttagatccgtgtttgtgttagatccgtgctgctagcgttcgtacacggatgcgacctgtacgtcagacacgttctgattgctaacttgccagtgtttctctttggggaatcctgggatggctctagccgttccgcagacgggatcgatttcatgattttttttgtttcgttgcatagggtttggtttgcccttttcctttatttcaatatatgccgtgcacttgtttgtcgggtcatcttttcatgcttttttttgtcttggttgtgatgatgtggtctggttgggcggtcgttctagatcggagtagaattctgtttcaaactacctggtggatttattaattttggatctgtatgtgtgtgccatacatattcatagttacgaattgaagatgatggatggaaatatcgatctaggataggtatacatgttgatgcgggttttactgatgcatatacagagatgctttttgttcgcttggttgtgatgatgtggtgtggttgggcggtcgttcattcgttctagatcggagtagaatactgtttcaaactacctggtgtatttattaattttggaactgtatgtgtgtgtcatacatcttcatagttacgagtttaagatggatggaaatatcgatctaggataggtatacatgttgatgtgggttttactgatgcatatacatgatggcatatgcagcatctattcatatgctctaaccttgagtacctatctattataataaacaagtatgttttataattattttgatcttgatatacttggatgatggcatatgcagcagctatatgtggatttttttagccctgccttcatacgctatttatttgcttggtactgtttcttttgtcgatgctcaccctgttgtttggtgttacttctgcaggtcgactttaacttagcctaggatccgcccatggtcgaacaggacggcctgcatgcaggatcaccagcggcctgggtcgaaagactcttcggctacgactgggcacaacagaccatcgggtgtagcgacgcagctgttttcaggctgtccgcacagggcagacccgttttgttcgtcaaaacagacctgtctggcgcgctcaacgaactgcaagacgaggccgcaagactgagctggcttgctaccacaggcgttccttgtgctgcagtcctcgacgtcgttactgaggctggaagagactggctgctcctgggtgaagtcccaggacaggaccttttgtccagccatctggcacctgccgaaaaggtcagcatcatggcagacgccatgagaaggctgcacacactcgaccctgcaacatgccccttcgatcaccaggcaaaacacaggatcgagcgcgcaagaacgcgcatggaggctggtttggtcgaccaagatgacctcgacgaggaacaccaaggactggctcctgctgaactcttcgccagactcaaggcgagaatgccagacggtgacgacctggtcgtcacacacggcgacgcttgtctcccaaacataatggtcgagaacggacgcttcagcggtttcatcgactgcggtagactcggagtcgctgacagataccaggacatcgccctggcaacacgcgacatcgcagaggaactcggaggcgaatgggctgacaggtttctcgtgctctacggtatcgctgctccagacagccagaggatcgcattctacaggctcctcgacgagttcttttagttcgaacggtacccggggatcctctagtgccgtgggtcgtttaagctgccgctgtacctgtgtcgtctggtgccttctggtgtacctgggaggttgtcgtctatcaagtatctgtggttggtgtcatgagtcagtgagtcccaatactgttcgtgtcctgtgtgcattatacccaaaactgttatgggcaaatcatgaataagcttgatgttcgaacttaaaagtctctgctcaatatggtattatggttgtttttgttcgtctcctaatatttgcctgggatcaaattttattggctggtgttcatttgacctccatgttcttgctaggctccattttttactctacagccataatatgtttgattgtttggtttgttctttgttgtacacctggttctgtcgagcttagttttcgacactggcttacagcttaacatgttgctattttattgggttctgattgctattttattgggttctgattgctagtttttgctgaatccaaaaaccatgttatttatttaagcgatccaggttattattatgatggtggctaagtttttttttttccaagggtaaattttctggattctccagtgtttctgtggccgaattcaatcactagagtcgacctgcaggatgaggagcaatcattgttcaagacatgatgcaaagctagaaaactttgattgtggccgtccttgtgaagtttaggccggggggaacttcatgaaccctatcgaagcttaattagttcttttttgttgttagccatgtttgtattgtagttaaggtgaacaacatgacgccgcacccgcgatctcagggctcgtccccacacaggagggcacgtcgtcgtcttcgccgccgagcatcagagattcagagcacatacacgcacatctcaagcaaacggagtagtacgtcctactcctacgtacatacctagccgacgacctttatgtgcacaccaccactgctctgctgcccggcctctccgtcgtccgttcatcaccaccggatccccacccagctttcttgtacaaagtggccgttaacggatcggccagaatggcccggaccgggttaccgaattcctgcccttaaggccaattgttcaagattcattcaacaattgaaacatctcccatgattaaatcagtataaggttgctatggtcttgcttgacaaagtttttttttgagggaatttcaactaaatttttgagtgaaactatcaaatactgattttaaaaaatttttataaaaggaagcgcagagataaaaggccatctatgctacaaaagtacccaaaaatgtaatcctaaagtatgaattgcattttttttttgtttggacgaaaggaaaggagtattaccacaagaatgatatcatcttcatatttagatcttttttgggtaaagcttgagattctctaaatatagagaaatcagaagaaaaaaaaaccgtgttttggtggttttgatttctagcctccacaataactttgacggcgtcgacaagtctaacggacaccaagcagcgaaccaccagcgccgagccaagcgaagcagacggccgagacgttgacaccttcggcgcggcatctctcgagagttccgctccggcgctccacctccaccgctggcggtttcttattccgttccgttccgcctcctgctctgctcctctccacaccacacggcacgaaaccgttacggcaccggcagcacccagcacgggagaggggattcctttcccaccgttccttccctttccgccccgccgctataaatagccagccccatccccagcttttttccccaatctcatctcctctctcctgttgttcggagcacacgcacaatccgatcgatccccaaatccccttcgtctctcctcgcgagcctcgtggatcccagcttcaaggtacggcgatcgatcatcccccctccttctctctaccttcttttctctagactacatcggatggcgatccatggttagggcctgctagtttcccttcctgttttgtcgatggctgcgaggcacaatagatctgatggcgttatgacggctaacttgtcatgttgttgcgatttatagtccctttaggagatcagtttaatttctcggatggttcgagatcggtggtccatggttagtaccctaagatccgcgctgttagggttcgtagatggaggcgacctgttctgattgttaacttgtcagtacctgggaaatcctgggatggttctagctcgtccgcagatgagatcgatttcatgatcctctgtatcttgtttcgttgcctaggttccgtctaatctatccgtggtatgatgtagatgttttgatcgtgctaactacgtcttgtaaagttaattgtcaggtcataatttttagcatgcctttttttttgtttggttttgtctaattgggctgtcgttctagatcagagtagaagactgttccaaactacctgctggatttattgaacttggatctgtatgtgtgtcacatatcttcataaattcatgattaagatggattgaaatatcttttatctttttggtatggatagttctatatgttggtgtggctttgttagatgtatacatgcttagatacatgaagcaacgtgctgctactgtttagtaattgctgttcatttgtctaataaacagataaggatatgtatttatgttgctgttggttttgctggtactttgttggatacaaatgcttcaatacagaaaacagcatgctgctacgatttaccatttatctaatcttatcatatgtctaatctaataaacaaacatgcttttaaattatcttcatatgcttggatgatggcatacacagcggctatgtgtggttttttaaatacccagcatcatgggcatgcatgacactgctttaatatgctttttatttgcttgagactgtttcttttgtttatactgaccctttagttcggtgactcttctgcaggtcgactttaacttagcctaggatccatggcccagtccaagcacggcctgaccaaggagatgaccatgaagtaccgcatggagggctgcgtggacggccacaagttcgtgatcaccggcgagggcatcggctaccccttcaagggcaagcaggccatcaacctgtgcgtggtggagggcggccccttgcccttcgccgaggacatcttgtccgccgccttcatgtacggcaaccgcgtgttcaccgagtacccccaggacatcgtcgactacttcaagaactcctgccccgccggctacacctgggaccgctccttcctgttcgaggacggcgccgtgtgcatctgcaacgccgacatcaccgtgagcgtggaggagaactgcatgtaccacgagtccaagttctacggcgtgaacttccccgccgacggccccgtgatgaagaagatgaccgacaactgggagccctcctgcgagaagatcatccccgtgcccaagcagggcatcttgaagggcgacgtgagcatgtacctgctgctgaaggacggtggccgcttgcgctgccagttcgacaccgtgtacaaggccaagtccgtgccccgcaagatgcccgactggcacttcatccagcacaagctgacccgcgaggaccgcagcgacgccaagaaccagaagtggcacctgaccgagcacgccatcgcctccggctccgccttgccctccggactcagatctcgatagggtaccaatggccagttaacagatccagctgctgctgttctagggttcacaagtctgcctatttgtcttccccaatggagctatggttgtctggtctggtccttggtcgtgtcccgtttcattgtgtactatttacctgtaatgtgtatccttaagtctggtttgatggtgtctgaaacgttttgctgtggtagagcagcatggaagaactataatgaataagtgatccctaatcattgtgtccaaattttgcttctgctatacccttttgtgctgtttcttatgttttgcttaaaaatttgatctgacaaacaaatttgtctaaattatgctcttgttctgactgtgtactgtacacatttgtattgctaccggtttggcacatagttttctctttgattgcagatcaaacccttctgattgcagattgcttggctatggctgatgtgctcactgttcttctttagcttgtatattgctgatggtggcttggctacggctgaaaaagttgctgctgcgccgacttggcaactgttgctccagtaatgctttgtcctctcttcctagccgccgacttggcacttggcagctgttgctcctgtaatgcgttgttatctcttatctcttgagatgtactatgattttgaggctgtttgacttgtgccagattgccagtgctgatgctatattatctcaggtttttatgctagtatatgttttactgtgtgctgcctgtgtcgagttacgtaatctattgaaccgctatgcgtgttgatgccctgttgttgcttgccagattgatgcccctgttgcttgcagcttgcaagctgtagtgaaatcctaaaattcgaaaccaaatctattctgaacttttgaagatctgtgatgtccggaagaaaagattcaaacagataaacgggactctccagaatctataaaataaatgatcgacaaacgctttgctttggtaggcttcctagttagttagcggaccgaagcttcggtccgggcctagaaggccagcttcggccgccccgggcaactttattatacaaagttgatagataaatcagatatctggttcctaaggacccggcggaccgattaaactgattcggtccgacgcgttacctaataacttcgtatagcatacattatacgaagttattagctaactaactagtaagcgtacacctgagctgattccgatgacttcgtaggttcctagctcaagccgctcgtgtccaagcgtcacttacgattagctaatgattacggcatctaggaccgactagctaactaactagtacgtacgcgccgactagctagctaaggtaccgagctcgaattcattccgattaatcgtggcctcttgctcttcaggatgaagagctatgtttaaacgtgcaagcgctactagacaattcagtacattaaaaacgtccgcaatgtgttattaagttgtctaagcgtcaatttgtttacaccacaatatatcctgcca

SEQ ID NO: 11 - DNA, 13032 bp, Artificial sequence
  Synthetic
gtttacccgccaatatatcctgtcaaacactgcggccgcacttgaccgcggatggagccggagctgtggtgaggccatcgacgggaggtgggggagaacacagtctcagtgttctttgtgagtccgcaaggtttttagcttttctgtattaattaaggttgctgttggctgtagaatacggtcgtggaagagctgtatcggtagctactacgtaagctattatatactggaagtctggagctcgtcgatctccggtcgtcttcctccatttctcctcgtcttgctttgactgctgctaccatttgcttctgttttctgatgaagcatgccatgtcggccaccagtgtttgtgtggtttttgcagggaatggctttcaagtgctgtgattgaatggccctcgtcgtcctcggctgagctcacatggacgcgtcatgtgagtgagatatatgatcatatgatgagtggggttcgggtgagtgcgtacttgaagtaggatcccgctttcactcattcattcattggcctttaaaccgggaaattttcgcgaggagatggagggaagcaagcagggtgacgagtgcagagtgccgcgagcgctttgtcaaaaggcaccgccgtaggcaaaaaaatcaatggccctgactgactcgatggtagtactactgtagagactagagagggttgctccccatatcttcgtgtgacttttactccagcattgcatttccgtcattgagacgttaattaatagcagctttcgggacagatgactgtggccatgtttcgtcacggccgcttcgtgccagctgggggtactatagtactgtgattttgttagtaaaaactttcattaggccaccattgacgaccgggccttcgcttttgctgcgctaattaaccatttcccggcgaccgaagggaacatgaacatgccccgacacatgagggcatgaggactagtgttctccctgtcgttcgttgacttgactagtgatagtttaaacgctcttcaactggaagagcggttactaccggttcactagctagctgctaagcgactaattaactagctgtcccacggcctaactagcacttaatcccctagcctaacctaagagcgctaatctaggctagtggtcacttagggctttaagcttaagggtcacctttgtccaccaagatggaactgtcttcggccagaatggccatctggattcagcaggcctagaaggccatttatcgctatcaactttgtatagaaaagttgggccgagctcggtacggccagaatggcccggaccgggttaccaagcggccgcatcgagcagctggcttgtggggaccagacaaaaaaggaatggtgcagaattgttaggcgcacctaccaaaagcatctttgcctttattgcaaagataaagcagattcctctagtacaagtggggaacaaaataacgtggaaaagagctgtcctgacagcccactcactaatgcgtatgacgaacgcagtgacgaccacaaaactcgagcaacgagatcatgagccaatcaaagaggagtgatgtagacctaaagcaataatggagccatgacgtaagggcttacgcccatacgaaataattaaaggctgatgtgacctgtcggtctctcagaacctttactttttatgtttggcgtgtatttttaaatttccacggcaatgacgatgtgaccgtcgacccactaaaacattgctttgtcaaaagctaaaaaagatgatgcccgacagccacttgtgtgaagcatgagaagccggtccctccactaagaaaattagtgaagcatcttccagtggtccctccactcacagctcaatcagtgagcaacaggacgaaggaaatgacgtaagccatgacgtctaatcccagggcccggtgaccaatcgaattcttaccctagctccctgcggctgttacgcggtcccccatcaatcttctgttcttgcggttgtagcctgtgtaacagtgctagagtatgtatgataaataggttttaagtctgcttacatgacattttttattgtggaagagacatataaaaattagagagagtggttctcatgcaacggcggacggcccggtgctaaaagagcttcaagacaaaataatgaaacaggaagagagtagatttatctaagagccaactttattatatgaatgtgtttattgttggctttagatgatatggtaaggagttagagctaataatagataggctctattattattattattaattaaactcgctctaaggaggaaagtgggaggaagggacgaggacgaagactactggaagcatcgtgcatggatgatggatgtggtgtctcttaatgtaggtggccggaggatgtacgtgttaattgcgcgataagcactcagatccaaccgcaaactacctccacactgacacactgatagagagaaagagagacctccgacgactgccgccgcagatgagccacgtacgtatacgacgtctgccggccggctcaggctgccgccatcaccctgctcgaaagtcgcgttaggcggcgccagctacataggagtatctagtctagccagttagtatactactactgcgctgatgatgaattaactctgcatagatactgtacttgcctccctccaacacccaaccacctcctgctcggctcttaataacttggacacggatcgatgccatccaaggaagaacacgacgacgacgacggaacatccaccatgcaagcttgcatccatacgccgatacgcgtgcatccatccatccaccattatttccattttccaccgatcacacgtacacaggcctatttaaggagcgacatcccactgcaactctcctcaccactcatcaccagctagctctagcaaagcacttgccatctaccgaccgccgcattccaaacagcccgacgagctagcagagcggcaggcacctccctcctcaaggaacccatggcggccaatgcgggcggcggtggagcgggaggaggcagcggcagcggcagcgtggctgcgccggcggtgtgccgccccagcggctcgcggtggacgccgacgccggagcagatcaggatgctgaaggagctctactacggctgcggcatccggtcgcccagctcggagcagatccagcgcatcaccgccatgctgcggcagcacggcaagatcgagggcaagaacgtcttctactggttccagaaccacaaggcccgcgagcgccagaagcgccgcctcaccagcctcgacgtcaacgtgcccgccgccggcgcggccgacgccaccaccagccaactcggcgtcctctcgctgtcgtcgccgccgccttcaggcgcggcgcctccctcgcccaccctcggcttctacgccgccggcaatggcggcggatcggctgtgctgctggacacgagttccgactggggcagcagcggcgctgctatggccaccgagacatgcttcctgcaggactacatgggcgtgacggacacgggcagctcgtcgcagtggccacgcttctcgtcgtcggacacgataatggcggcggccgcggcgcgggcggcgacgacgcgggcgcccgagacgctccctctcttcccgacctgcggcgacgacggcggcagcggtagcagcagctacttgccgttctggggtgccgcgtccacaactgccggcgccacttcttccgttgcgatccaacagcaacaccagctgcaggagcagtacagcttttacagcaacagcaacagcacccagctggccggcaccggcaaccaagacgtatcggcaacagcagcagcagccgccgccctggagctgagcctcagctcatggtgctccccttaccctgctgcagggagtatgggctccggcgagggtcgcggttccctcctgacctgcggcgacgtggaggaaaaccccggtccgcccatggcaccgaagaagaagcgcaaggtgatggacaagaagtacagcatcggcctcgacatcggcaccaactcggtgggctgggccgtcatcacggacgaatataaggtcccgtcgaagaagttcaaggtcctcggcaatacagaccgccacagcatcaagaaaaacttgatcggcgccctcctgttcgatagcggcgagaccgcggaggcgaccaggctcaagaggaccgccaggagacggtacactaggcgcaagaacaggatctgctacctgcaggagatcttcagcaacgagatggcgaaggtggacgactccttcttccaccgcctggaggaatcattcctggtggaggaggacaagaagcatgagcggcacccaatcttcggcaacatcgtcgacgaggtaagtttctgcttctacctttgatatatatataataattatcattaattagtagtaatataatatttcaaatatttttttcaaaataaaagaatgtagtatatagcaattgcttttctgtagtttataagtgtgtatattttaatttataacttttctaatatatgaccaaaacatggtgatgtgcaggtggcctaccacgagaagtacccgacaatctaccacctccggaagaaactggtggacagcacagacaaggcggacctccggctcatctaccttgccctcgcgcatatgatcaagttccgcggccacttcctcatcgagggcgacctgaacccggacaactccgacgtggacaagctgttcatccagctcgtgcagacgtacaatcaactgttcgaggagaaccccataaacgctagcggcgtggacgccaaggccatcctctcggccaggctctcgaaatcaagaaggctggagaaccttatcgcgcagttgccaggcgaaaagaagaacggcctcttcggcaaccttattgcgctcagcctcggcctgacgccgaacttcaaatcaaacttcgacctcgcggaggacgccaagctccagctctcaaaggacacctacgacgacgacctcgacaacctcctggcccagataggagaccagtacgcggacctcttcctcgccgccaagaacctctccgacgctatcctgctcagcgacatccttcgggtcaacaccgaaattaccaaggcaccgctgtccgccagcatgattaaacgctacgacgagcaccatcaggacctcacgctgctcaaggcactcgtccgccagcagctccccgagaagtacaaggagatcttcttcgaccaatcaaaaaacggctacgcgggatatatcgacggcggtgccagccaggaagagttctacaagttcatcaaaccaatcctggagaagatggacggcaccgaggagttgctggtcaagctcaacagggaggacctcctcaggaagcagaggaccttcgacaacggctccatcccgcatcagatccacctgggcgaactgcatgccatcctgcggcgccaggaggacttctacccgttcctgaaggataaccgggagaagatcgagaagatcttgacgttccgcatcccatactacgtgggcccgctggctcgcggcaactcccggttcgcctggatgacccggaagtcggaggagaccatcacaccctggaactttgaggaggtggtcgataagggcgctagcgctcagagcttcatcgagcgcatgaccaacttcgataaaaacctgcccaatgaaaaagtcctccccaagcactcgctgctctacgagtacttcaccgtgtacaacgagctcaccaaggtcaaatacgtcaccgagggcatgcggaagccggcgttcctgagcggcgagcagaagaaggcgatagtggacctcctcttcaagaccaacaggaaggtgaccgtgaagcaattaaaagaggactacttcaagaaaatagagtgcttcgactccgtggagatctcgggcgtggaggatcggttcaacgcctcactcggcacgtatcacgacctcctcaagatcattaaagacaaggacttcctcgacaacgaggagaacgaggacatcctcgaggacatcgtcctcaccctgaccctgttcgaggaccgcgaaatgatcgaggagaggctgaagacctacgcgcacctgttcgacgacaaggtcatgaaacagctcaagaggcgccgctacactggttggggaaggctgtcccgcaagctcattaatggcatcagggacaagcagagcggcaagaccatcctggacttcctcaagtccgacgggttcgccaaccgcaacttcatgcagctcattcacgacgactcgctcacgttcaaggaagacatccagaaggcacaggtgagcgggcagggtgactccctccacgaacacatcgccaacctggccggctcgccggccattaaaaagggcatcctgcagacggtcaaggtcgtcgacgagctcgtgaaggtgatgggccggcacaagcccgaaaatatcgtcatagagatggccagggagaaccagaccacccaaaaagggcagaagaactcgcgcgagcggatgaaacggatcgaggagggcattaaagagctcgggtcccagatcctgaaggagcaccccgtggaaaatacccagctccagaatgaaaagctctacctctactacctgcagaacggccgcgacatgtacgtggaccaggagctggacattaatcggctatcggactacgacgtcgaccacatcgtgccgcagtcgttcctcaaggacgatagcatcgacaacaaggtgctcacccggtcggataaaaatcggggcaagagcgacaacgtgcccagcgaggaggtcgtgaagaagatgaaaaactactggcgccagctcctcaacgcgaaactgatcacccagcgcaagttcgacaacctgacgaaggcggaacgcggtggcttgagcgaactcgataaggcgggcttcataaaaaggcagctggtcgagacgcgccagatcacgaagcatgtcgcccagatcctggacagccgcatgaatactaagtacgatgaaaacgacaagctgatccgggaggtgaaggtgatcacgctgaagtccaagctcgtgtcggacttccgcaaggacttccagttctacaaggtccgcgagatcaacaactaccaccacgcccacgacgcctacctgaatgcggtggtcgggaccgccctgatcaagaagtacccgaagctggagtcggagttcgtgtacggcgactacaaggtctacgacgtgcgcaaaatgatcgccaagtccgagcaggagatcggcaaggccacggcaaaatacttcttctactcgaacatcatgaacttcttcaagaccgagatcaccctcgcgaacggcgagatccgcaagcgcccgctcatcgaaaccaacggcgagacgggcgagatcgtctgggataagggccgggatttcgcgacggtccgcaaggtgctctccatgccgcaagtcaatatcgtgaaaaagacggaggtccagacgggcgggttcagcaaggagtccatcctcccgaagcgcaactccgacaagctcatcgcgaggaagaaggattgggacccgaaaaaatatggcggcttcgacagcccgaccgtcgcatacagcgtcctcgtcgtggcgaaggtggagaagggcaagtcaaagaagctcaagtccgtgaaggagctgctcgggatcacgattatggagcggtcctccttcgagaagaacccgatcgacttcctagaggccaagggatataaggaggtcaagaaggacctgattattaaactgccgaagtactcgctcttcgagctggaaaacggccgcaagaggatgctcgcctccgcaggcgagttgcagaagggcaacgagctcgccctcccgagcaaatacgtcaatttcctgtacctcgctagccactatgaaaagctcaagggcagcccggaggacaacgagcagaagcagctcttcgtggagcagcacaagcattacctggacgagatcatcgagcagatcagcgagttctcgaagcgggtgatcctcgccgacgcgaacctggacaaggtgctgtcggcatataacaagcaccgcgacaaaccaatacgcgagcaggccgaaaatatcatccacctcttcaccctcaccaacctcggcgctccggcagccttcaagtacttcgacaccacgattgaccggaagcggtacacgagcacgaaggaggtgctcgatgcgacgctgatccaccagagcatcacagggctctatgaaacacgcatcgacctgagccagctgggcggagacaagagaccacgggaccgccacgatggcgagctgggaggccgcaagcgggcaaggtaggtaccgccgtgggtcgtttaagctgccgctgtacctgtgtcgtctggtgccttctggtgtacctgggaggttgtcgtctatcaagtatctgtggttggtgtcatgagtcagtgagtcccaatactgttcgtgtcctgtgtgcattatacccaaaactgttatgggcaaatcatgaataagcttgatgttcgaacttaaaagtctctgctcaatatggtattatggttgtttttgttcgtctcctaatatttgcctgggatcaaattttattggctggtgttcatttgacctccatgttcttgctaggctccattttttactctacagccataatatgtttgattgtttggtttgttctttgttgtacacctggttctgtcgagcttagttttcgacactggcttacagcttaacatgttgctattttattgggttctgattgctattttattgggttctgattgctagtttttgctgaatccaaaaaccatgttatttatttaagcgatccaggttattattatgatggtggctaagtttttttttttccaagggtaaattttctggattctccagtgtttctgtggccgaattcaccggtgttaacggcaaacgctaattagtcactaggcccaggaaacactaactaagccctagcttatcctagcgcaacctagttaggtcttggttaccggcctagaaggccgatctcccgggcacccagctttcttgtacaaagtggccgttaacggatcggccagaatggcccggaccgaagccgaggccggccacactgatagtttaaactgaaggcgggaaacgacaatctgatcatgagcggagaattaagggagtcacgttatgacccccgccgatgacgcgggacaagccgttttacgtttggaactgacagaaccgcaacgattgaaggagccactcagccgcgggtttctggagtttaatgagctaagcacatacgtcagaaaccattattgcgcgttcaaaagtcgcctaaggtcactatcagctagcaaatatttcttgtcaaaaatgctccactgacgttccataaattcccctcggtatccaattagagtctcatattcactctcccggcggatctcgactctagaggatcgctcaggaaggccgctgagatagagccatggggaggagggcgtgttgcgcgaaggaaggcgttaagagaggggcgtggacgagcaaggaggacgatgccttggccgcctacgtcaaggcccacggcgaaggcaaatggagggaagtgccccagaaagccggtttgcgtcggtgcggcaagagctgccggctgcggtggctgaactacctccggcccaacatcaggcgcggcaacatctcctacgacgaggaggatctcatcatccgcctccacaggctcctcggcaacaggtggtcgctgattgcaggcaggctgcctggccgaacagacaatgaaatcaagaactactggaacagcacgctgggccggagggcaggcgccggcgccggcgccggcggcagatccacgatggcgctttcagcttcccgagttcagcaggcggaagaactgctgcaacgacctgctgagaggcagctgatgaggagccagcttgctgcagccgccaggagcatcaactggagctacgccctcttctggtccatttcagacactcaaccaggggtgctgacgtggacggacgggttctacaacggcgaggtgaagacgcggaagatttccaactccgtggagctgacatccgaccagctcgtcatgcagaggagcgaccagctccgggagctctacgaggccctcctgtcgggcgagggcgaccgccgcgctgcgcctgcgcggccggccggctctctgtcgccggaggacctcggcgacaccgagtggtactacgtggtgtccatgacctacgccttccggccaggccaagggttgcccggcaggagtttcgcgagcgacgagcatgtctggctgtgcaacgcgcacctcgccggcagcaaagccttcccccgcgcgctcctcgccaagagcgcgtccattcagtcaatcctctgcatcccggttatgggcggcgtgcttgagcttggtacaactgacacggtgccggaggccccggacttggtcagccgagcaaccgcggctttctgggagccgcagtgcccgagctccagcccgtcaggacgagcaaacgagacgggcgaggccgcagcagacgacggcacgtttgcgttcgaggaactcgaccacaataatggcatggacgacatagaggcgatgaccgccgccgggggacacgggcaggaggaggagctaagactaagagaagccgaggccctgtcagacgacgcaagcctggagcacatcaccaaggagatcgaggagttctacagcctctgcgacgaaatggacctgcaggcgctaccactaccgctagaggacggctggaccgtggacgcgtccaatttcgaggtcccctgctcttccccgcagccagcgccgcctccggtggatagggctaccgctaacgtcgccgccgacgcctcaagggcacccgtctacggctctcgcgcgacgagtttcatggcttggacgaggtcctcgcagcagtcgtcgtgctccgacgacgcggcgcccgcagcagtagtgccggccatcgaggagccgcagagattgctgaagaaagtggtggccggcggcggtgcttgggagagctgtggcggcgcgacgggagcagcacaggaaatgagtggcactggcaccaagaaccacgtcatgtcggagcgaaagcgacgagagaagctcaacgagatgttcctcgtcctcaagtcactgcttccgtccattcacagggtgaacaaagcgtcgatcctcgccgaaacgatagcctacctcaaggagcttcagagaagggtgcaagagctggagtccagtagggaacctgcgtcgcgcccatccgaaacgacgacaaggctaataacaaggccctcccgtggcaataatgagagtgtgaggaaggaggtctgcgcgggctccaagaggaagagcccagagctcggcagagacgacgtggagcgccccccggtcctcacgatggacgccggcaccagcaacgtcaccgtcaccgtctcggacaaggatgtgctcctggaggtgcagtgccggtgggaggagctcctgatgacgcgagtgttcgacgccatcaagagcctccatttggacgtcctctcggttcaggcttcagcgccagatggcttcatggggcttaagatacgagctcagtttgctggctccggtgccgtcgtgccctggatgatcagcgaggctcttcgcaaagctatagggaacccctgggtcgtcgtcgcgccggacaccggctcgcacgccaccccggccgcgacgtcgggcgcctgcgagacgggccagaatagcgccgctcatcgcgcggaccccgactcagccgggacgacgacgacctcggcggcggcggtgtgggcgcccaaggccgtgcggtgcacgggcggactcttcttcttccaccgggacacgacgccggcgcacgcgggcgagacggcgacgccaatggccggtggaggtggaggaggaggaggagaagcagggtcgtcggacgactgcagctcggcggcgtcggtatcgcttcgcgtcggaagccacgacgagccgtgcttctccggcgacggtgacggcgactggatggacgacgtgagggccctggcgtcgtttctggagtccgacgaggactggctccgctgtcagacggccgggcagcttgcgtagtggccaggtaccactaactatctatactgtaataatgttgtatagccgccggatagctagctagtttagtcattcagcggcgatgggtaataataaagtgtcatccatccatcaccatgcgtggcaacgtgagcaatgacctgattgaacaaattgaaatgaaaagaagaaatatgttatatgtcaacgagatttcctcataatgccactgacgacgtgtgtccaagaaatgtatcagtgatacgtatattcacaatttttttatgacttatactcacaatttgtttttttactacttatactcacaatttgttgtgcgtaccataacaatttcgatcgaatatatatcagaaagttgacgaaagtaagctcactcaaaaagttaaatgggctgcggaagctgcgtcaggcccaagttttggctattctatccggtatccacgattttgatggctgagggacatatgttcgcttaagcttggcgcgccggtcacccggtccgggcctagaaggccagcttcggccgccccgggcaactttattatacaaagttgatagataaatcagatatctggttcctaaggacccgtgtacacctgagcctaactaactaggcctctaacacgctaaccccttagagagttcctaacgccctagactagttcaataagtcggcctaactaaactggctaacggtaccgagctcgaattcattccgattaatcgtggcctcttgctcttcaggatgaagagctatgtttaaacgtgcaagcgctactagacaattcagtacattaaaaacgtccgcaatgtgttattaagttgtctaagcgtcaatttgtttacaccacaatatatcctgcca

SEQ ID NO: 12 - DNA, 9961 bp, Artificial sequence
  Synthetic
ggtttacccgccaatatatcctgtcaaacactgcggccgcacttgaccgcggatggagccggagctgtggtgaggccatcgacgggaggtgggggagaacacagtctcagtgttctttgtgagtccgcaaggtttttagcttttctgtattaattaaggttgctgttggctgtagaatacggtcgtggaagagctgtatcggtagctactacgtaagctattatatactggaagtctggagctcgtcgatctccggtcgtcttcctccatttctcctcgtcttgctttgactgctgctaccatttgcttctgttttctgatgaagcatgccatgtcggccaccagtgtttgtgtggtttttgcagggaatggctttcaagtgctgtgattgaatggccctcgtcgtcctcggctgagctcacatggacgcgtcatgtgagtgagatatatgatcatatgatgagtggggttcgggtgagtgcgtacttgaagtaggatcccgctttcactcattcattcattggcctttaaaccgggaaattttcgcgaggagatggagggaagcaagcagggtgacgagtgcagagtgccgcgagcgctttgtcaaaaggcaccgccgtaggcaaaaaaatcaatggccctgactgactcgatggtagtactactgtagagactagagagggttgctccccatatcttcgtgtgacttttactccagcattgcatttccgtcattgagacgttaattaatagcagctttcgggacagatgactgtggccatgtttcgtcacggccgcttcgtgccagctgggggtactatagtactgtgattttgttagtaaaaactttcattaggccaccattgacgaccgggccttcgcttttgctgcgctaattaaccatttcccggcgaccgaagggaacatgaacatgccccgacacatgagggcatgaggactagtgttctccctgtcgttcgttgacttgactagtgatagtttaaacgctcttcaactggaagagcggttactaccggttcactagctagctgctaatcgagctagttaccctatgaggtgacatgaagcgctcacggttactatgacggttagcttcacgactgttggtggcagtagcgtacgacttagctatagttccggacttacccttaagataacttcgtatagcatacattatacgaagttatgggcccacgcgtgaagagcggttaccagagctggtcacctttgtccaccaagatggaactgtcttcggccagaatggccatctggattcagcaggcctagaaggccatttatcgctatcaactttgtatagaaaagttgggccagaatggcccggaccgggttaccaagcggccgcggaaaaccgtcgacctcgaggcataatgaggatcgaggatgaggagcatgcacggatagatggcgtctagcatatcgataggacatgacaagtggtacgatccccgtcacatgtccatggaggcatctgatatggacacggcgtgtatctatcgcggctggaacagaaccagcgctcgcgcggcggtcggcgggagggacagaccttggctccgtgcgttcaggttgtgcttgtgccgcgcgccacgcacggtctccgccgcctgcagctgaaattttagatttacatcctatccctttattttttttatttgtcacaattcagttcaaaaatgaagaacggaggtagtgcatcctttgtgagactaatgaaaatcacatctggatcctgaaatcggcgtcgtaacctacaaggccacggactggattagatagtggtccatggtgcataatgaggatcgaggcacggttacccggagcttgcatgcctgcagtgcagcgtgacccggtcgtgcccctctctagagataatgagcattgcatgtctaagttataaaaaattaccacatattttttttgtcacacttgtttgaagtgcagtttatctatctttatacatatatttaaactttactctacgaataatataatctatagtactacaataatatcagtgttttagagaatcatataaatgaacagttagacatggtctaaaggacaattgagtattttgacaacaggactctacagttttatctttttagtgtgcatgtgttctcctttttttttgcaaatagcttcacctatataatacttcatccattttattagtacatccatttagggtttagggttaatggtttttatagactaatttttttagtacatctattttattctattttagcctctaaattaagaaaactaaaactctattttagtttttttatttaataatttagatataaaatagaataaaataaagtgactaaaaattaaacaaataccctttaagaaattaaaaaaactaaggaaacatttttcttgtttcgagtagataatgccagcctgttaaacgccgtcgacgagtctaacggacaccaaccagcgaaccagcagcgtcgcgtcgggccaagcgaagcagacggcacggcatctctgtcgctgcctctggacccctctcgagagttccgctccaccgttggacttgctccgctgtcggcatccagaaattgcgtggcggagcggcagacgtgagccggcacggcaggcggcctcctcctcctctcacggcaccggcagctacgggggattcctttcccaccgctccttcgctttcccttcctcgcccgccgtaataaatagacaccccctccacaccctctttccccaacctcgtgttgttcggagcgcacacacacacaaccagatctcccccaaatccacccgtcggcacctccgcttcaaggtacgccgctcgtcctcccccccccccctctctaccttctctagatcggcgttccggtccatgcatggttagggcccggtagttctacttctgttcatgtttgtgttagatccgtgtttgtgttagatccgtgctgctagcgttcgtacacggatgcgacctgtacgtcagacacgttctgattgctaacttgccagtgtttctctttggggaatcctgggatggctctagccgttccgcagacgggatcgatttcatgattttttttgtttcgttgcatagggtttggtttgcccttttcctttatttcaatatatgccgtgcacttgtttgtcgggtcatcttttcatgcttttttttgtcttggttgtgatgatgtggtctggttgggcggtcgttctagatcggagtagaattctgtttcaaactacctggtggatttattaattttggatctgtatgtgtgtgccatacatattcatagttacgaattgaagatgatggatggaaatatcgatctaggataggtatacatgttgatgcgggttttactgatgcatatacagagatgctttttgttcgcttggttgtgatgatgtggtgtggttgggcggtcgttcattcgttctagatcggagtagaatactgtttcaaactacctggtgtatttattaattttggaactgtatgtgtgtgtcatacatcttcatagttacgagtttaagatggatggaaatatcgatctaggataggtatacatgttgatgtgggttttactgatgcatatacatgatggcatatgcagcatctattcatatgctctaaccttgagtacctatctattataataaacaagtatgttttataattattttgatcttgatatacttggatgatggcatatgcagcagctatatgtggatttttttagccctgccttcatacgctatttatttgcttggtactgtttcttttgtcgatgctcaccctgttgtttggtgttacttctgcaggtcgactttaacttagcctaggatccgcccatggtcgaacaggacggcctgcatgcaggatcaccagcggcctgggtcgaaagactcttcggctacgactgggcacaacagaccatcgggtgtagcgacgcagctgttttcaggctgtccgcacagggcagacccgttttgttcgtcaaaacagacctgtctggcgcgctcaacgaactgcaagacgaggccgcaagactgagctggcttgctaccacaggcgttccttgtgctgcagtcctcgacgtcgttactgaggctggaagagactggctgctcctgggtgaagtcccaggacaggaccttttgtccagccatctggcacctgccgaaaaggtcagcatcatggcagacgccatgagaaggctgcacacactcgaccctgcaacatgccccttcgatcaccaggcaaaacacaggatcgagcgcgcaagaacgcgcatggaggctggtttggtcgaccaagatgacctcgacgaggaacaccaaggactggctcctgctgaactcttcgccagactcaaggcgagaatgccagacggtgacgacctggtcgtcacacacggcgacgcttgtctcccaaacataatggtcgagaacggacgcttcagcggtttcatcgactgcggtagactcggagtcgctgacagataccaggacatcgccctggcaacacgcgacatcgcagaggaactcggaggcgaatgggctgacaggtttctcgtgctctacggtatcgctgctccagacagccagaggatcgcattctacaggctcctcgacgagttcttttagttcgaacggtacccggggatcctctagtgccgtgggtcgtttaagctgccgctgtacctgtgtcgtctggtgccttctggtgtacctgggaggttgtcgtctatcaagtatctgtggttggtgtcatgagtcagtgagtcccaatactgttcgtgtcctgtgtgcattatacccaaaactgttatgggcaaatcatgaataagcttgatgttcgaacttaaaagtctctgctcaatatggtattatggttgtttttgttcgtctcctaatatttgcctgggatcaaattttattggctggtgttcatttgacctccatgttcttgctaggctccattttttactctacagccataatatgtttgattgtttggtttgttctttgttgtacacctggttctgtcgagcttagttttcgacactggcttacagcttaacatgttgctattttattgggttctgattgctattttattgggttctgattgctagtttttgctgaatccaaaaaccatgttatttatttaagcgatccaggttattattatgatggtggctaagtttttttttttccaagggtaaattttctggattctccagtgtttctgtggccgaattcaatcactagagtcgacctgcaggatgaggagcaatcattgttcaagacatgatgcaaagctagaaaactttgattgtggccgtccttgtgaagtttaggccggggggaacttcatgaaccctatcgaagcttaattagttcttttttgttgttagccatgtttgtattgtagttaaggtgaacaacatgacgccgcacccgcgatctcagggctcgtccccacacaggagggcacgtcgtcgtcttcgccgccgagcatcagagattcagagcacatacacgcacatctcaagcaaacggagtagtacgtcctactcctacgtacatacctagccgacgacctttatgtgcacaccaccactgctctgctgcccggcctctccgtcgtccgttcatcaccagcataatgaggatcgaggatgaggccggatccccacccagctttcttgtacaaagtggccgttaacggatcggccagaatggcccggaccgggttaccgaattcctgcccttaaggccaattgttcaagattcattcaacaattgaaacatctcccatgattaaatcagtataaggttgctatggtcttgcttgacaaagtttttttttgagggaatttcaactaaatttttgagtgaaactatcaaatactgattttaaaaaatttttataaaaggaagcgcagagataaaaggccatctatgctacaaaagtacccaaaaatgtaatcctaaagtatgaattgcattttttttttgtttggacgaaaggaaaggagtattaccacaagaatgatatcatcttcatatttagatcttttttgggtaaagcttgagattctctaaatatagagaaatcagaagaaaaaaaaaccgtgttttggtggttttgatttctagcctccacaataactttgacggcgtcgacaagtctaacggacaccaagcagcgaaccaccagcgccgagccaagcgaagcagacggccgagacgttgacaccttcggcgcggcatctctcgagagttccgctccggcgctccacctccaccgctggcggtttcttattccgttccgttccgcctcctgctctgctcctctccacaccacacggcacgaaaccgttacggcaccggcagcacccagcacgggagaggggattcctttcccaccgttccttccctttccgccccgccgctataaatagccagccccatccccagcttttttccccaatctcatctcctctctcctgttgttcggagcacacgcacaatccgatcgatccccaaatccccttcgtctctcctcgcgagcctcgtggatcccagcttcaaggtacggcgatcgatcatcccccctccttctctctaccttcttttctctagactacatcggatggcgatccatggttagggcctgctagtttcccttcctgttttgtcgatggctgcgaggcacaatagatctgatggcgttatgacggctaacttgtcatgttgttgcgatttatagtccctttaggagatcagtttaatttctcggatggttcgagatcggtggtccatggttagtaccctaagatccgcgctgttagggttcgtagatggaggcgacctgttctgattgttaacttgtcagtacctgggaaatcctgggatggttctagctcgtccgcagatgagatcgatttcatgatcctctgtatcttgtttcgttgcctaggttccgtctaatctatccgtggtatgatgtagatgttttgatcgtgctaactacgtcttgtaaagttaattgtcaggtcataatttttagcatgcctttttttttgtttggttttgtctaattgggctgtcgttctagatcagagtagaagactgttccaaactacctgctggatttattgaacttggatctgtatgtgtgtcacatatcttcataaattcatgattaagatggattgaaatatcttttatctttttggtatggatagttctatatgttggtgtggctttgttagatgtatacatgcttagatacatgaagcaacgtgctgctactgtttagtaattgctgttcatttgtctaataaacagataaggatatgtatttatgttgctgttggttttgctggtactttgttggatacaaatgcttcaatacagaaaacagcatgctgctacgatttaccatttatctaatcttatcatatgtctaatctaataaacaaacatgcttttaaattatcttcatatgcttggatgatggcatacacagcggctatgtgtggttttttaaatacccagcatcatgggcatgcatgacactgctttaatatgctttttatttgcttgagactgtttcttttgtttatactgaccctttagttcggtgactcttctgcaggtcgactttaacttagcctaggatccatggcccagtccaagcacggcctgaccaaggagatgaccatgaagtaccgcatggagggctgcgtggacggccacaagttcgtgatcaccggcgagggcatcggctaccccttcaagggcaagcaggccatcaacctgtgcgtggtggagggcggccccttgcccttcgccgaggacatcttgtccgccgccttcatgtacggcaaccgcgtgttcaccgagtacccccaggacatcgtcgactacttcaagaactcctgccccgccggctacacctgggaccgctccttcctgttcgaggacggcgccgtgtgcatctgcaacgccgacatcaccgtgagcgtggaggagaactgcatgtaccacgagtccaagttctacggcgtgaacttccccgccgacggccccgtgatgaagaagatgaccgacaactgggagccctcctgcgagaagatcatccccgtgcccaagcagggcatcttgaagggcgacgtgagcatgtacctgctgctgaaggacggtggccgcttgcgctgccagttcgacaccgtgtacaaggccaagtccgtgccccgcaagatgcccgactggcacttcatccagcacaagctgacccgcgaggaccgcagcgacgccaagaaccagaagtggcacctgaccgagcacgccatcgcctccggctccgccttgccctccggactcagatctcgatagggtaccaatggccagttaacagatccagctgctgctgttctagggttcacaagtctgcctatttgtcttccccaatggagctatggttgtctggtctggtccttggtcgtgtcccgtttcattgtgtactatttacctgtaatgtgtatccttaagtctggtttgatggtgtctgaaacgttttgctgtggtagagcagcatggaagaactataatgaataagtgatccctaatcattgtgtccaaattttgcttctgctatacccttttgtgctgtttcttatgttttgcttaaaaatttgatctgacaaacaaatttgtctaaattatgctcttgttctgactgtgtactgtacacatttgtattgctaccggtttggcacatagttttctctttgattgcagatcaaacccttctgattgcagattgcttggctatggctgatgtgctcactgttcttctttagcttgtatattgctgatggtggcttggctacggctgaaaaagttgctgctgcgccgacttggcaactgttgctccagtaatgctttgtcctctcttcctagccgccgacttggcacttggcagctgttgctcctgtaatgcgttgttatctcttatctcttgagatgtactatgattttgaggctgtttgacttgtgccagattgccagtgctgatgctatattatctcaggtttttatgctagtatatgttttactgtgtgctgcctgtgtcgagttacgtaatctattgaaccgctatgcgtgttgatgccctgttgttgcttgccagattgatgcccctgttgcttgcagcttgcaagctgtagtgaaatcctaaaattcgaaaccaaatctattctgaacttttgaagatctgtgatgtccggaagaaaagattcaaacagataaacgggactctccagaatctataaaataaatgatcgacaaacgctttgctttggtaggcttcctagttagttagcggaccgaagcttcggtccgggcctagaaggccagcttcggccgccccgggcaactttattatacaaagttgatagataaatcagatatctggttcctaaggacccggcggaccgattaaactgattcggtccgacgcgttacctaataacttcgtatagcatacattatacgaagttattagctaactaactagtaagcgtacacctgagctgattccgatgacttcgtaggttcctagctcaagccgctcgtgtccaagcgtcacttacgattagctaatgattacggcatctaggaccgactagctaactaactagtacgtacgcgccgactagctagctaaggtaccgagctcgaattcattccgattaatcgtggcctcttgctcttcaggatgaagagctatgtttaaacgtgcaagcgctactagacaattcagtacattaaaaacgtccgcaatgtgttattaagttgtctaagcgtcaatttgtttacaccacaatatatcctgccacca

SEQ ID NO: 13 - DNA, 23993 bp, Artificial sequence
  Synthetic
gaaaaatatcgccactggcaaggaatgggtttgagatggcgaagtctgtcctaaaagcagcgcctgtagttgtagggttgacggccttgatggagcgtcatgccgatgccctctcgagccaacttcaagcacatcatcttaaggttttcccgccgcattccgagaagggcattcgaacattcgggccatcggaggcgtccaagctgctcggcgttggcgagtcatatttacggcagaccgcgtctgagatgccagagttgaatgttagcatgagcccgggtggcaggcgaatgttctcaattgaagatatccatgcgattcggaagtatatggatcaggtcggccgcgggaaccggcgctacctgccacatcgtcgaggcggcgagcagcttcaggttatctctgtgatgaatttcaaaggtgggtcgggtaagaccaccaccgccgcgcatctggcgcagtacctcgctatgcgcggatatcgagtcttggccattgatctcgatcctcaagcgagcctttctgcactctttgggagccaaccggagacggacgttggcccgaacgaaacgctctacggcgctataaggtatgatgatgagcaggtggcaatcgaacgagtcgtccgagggacttacattcccgacctccacctgattcctggtaatcttgagctgatggagtttgaacacgatacgccacgcgcgctgatgaaccgcaaagagggcgacacgctcttttatggtcgcatcagccaagtaattgaagatatcgcggataactatgacgtcgtggtcatcgactgccctccccagcttgggtatctcacgctatccgcattgactgcggcgacgtccattcttgtcacggtccatccgcagatgctggatgtgatgtcgatgaaccagtttctggcaatgacatcgaaccttttgcgtgaaatcgagaatgctggcgccaagttcaagtttaattggatgcgctatctgataacccgtttcgaaccgagcgacggaccacagaaccaaatggtaggttatctgcggtcgatttttggcgaaaatgtcctcaattttccgatgcttaaaaccaccgcggtttcggacgctggcctgacaaaccagactctattcgaagtggagcgtggcctgttcacgcgctcgacctatgatcgagccttggaggcgatgaacgccgtcaacgacgagatcgaaacactgatcaaaaaagcatggggtaggcccacatgagccggaagcacatccttggcgtctcaactgacgcccctgagacgtcgcccgccgacaataggacggcaaagaaccgctccatgccgctcctcggcgtaacaaggaaggagcgcgatccggcaacgaagctcacagcgaacattggtaacgcactgcgagagcaaaacgatcgtcttagccgtgccgaagagatcgagcggcgtctcgctgaaggtcaggcagtgatagagttggatgcctcgtcaatagaaccgtctttcgtgcaggatcgtatgcgaggggacattgacgggctccttacttcgatccgggaacaaggacagcaagtcccaatccttgtgcgaccgcatccgagccagccgggccgatatcaggttgccttcggccaccgccggctacgcgccgtttcagaactcggacttccggtcagagcggtcgttcgcgaactgacggacgagcaagtggtcgtagcacagggtcaggaaaacaatgagcgcgaagatcttaccttcatcgaaaaggcgcgcttcgcacatcgcctgaacaggcagttttctcgagagattgtcatcgccgcgatgtcgatcgacaagagcaatttgtccaagatgcttctgctcgttgacgccctcccctctgaactgaccgatgctattggtgccgctcctggtgttggacggccgagttggcaacaacttgccgagctgattgagaaagtttcttcaccggccgacgtggctaaatatgctatgtcggaggaagttcaagcgctgccatcggcagaacgattcaaggcggtgatcgctagtctgaagcccagtcgggttgcgcgtggacttcccgaggtcatggccaccccagacggcaccagaattgcacaggtgacgcagagcaaggccaaactggaaatcacgattgacaggaaggcgacgcccgattttgcgaccttcgtgctcgatcatgtgccagcgctgtatcaagcgtaccacgctgagaaccaacggaaacggggagagtaaaccgcaaaagaaaagagccccctcaacgtcgccgtcgcggaagcccttctgtctctctagcgcgaacagaatcgcatttcctcgaatcctcgtcaagagtttttagcgccgttttggtgagctgatttcctttgcctgctgaaaggtgaaagatgatgcagacaggaagtgtaacgacgccattcgggcggcggccaatgacgcttgcgcttgtgcggcgccagacggcgctggccgatatcaaacaaggcaagacagcggacaagtggaaggtctttagagacgcgtccgcggctatggaactacttggaatccagtccaacagtcttgccgtccttgatgcgctattgagctttcacccggaaacggagttgcgtcaggaggcacagctgatcgtcttcccgtcgaatgctcagcttgcccttcgggcgcatgggatggctggcgcgactttgcgtaggcacatcgccatgctcgtggagtcaggcttgatcgtccggaaggatagcgccaacggaaagcgttacgctcgtaaggatggcgctggtcagatcgagcgcgcgtttggcttcgatttgtctccgcttctcgcgcggtcggaagagctagcgatgatggcacagcaggtgatggccgatcgagcagcattcaggatggccaaagaaagtctgacgatttgccgacgggacgttcggaagctaattacggcagctatggaagagggagcggagggcgactggcaagctgtcgaggaagtctatgtggaacttgtgggtagaattccacgcgccccgacgcttgctgatgtagagtcaattctcgaagagatgtggatgctccaggaagagataatcaaccggttggaaattagagacaattcagaaaataatagcaccaatgctgcccagagcgagcagcacatacagaattcaaaacccgaatccgttaatgaacttgaacctcgctctgaaaaggagcagggcgctaagccgagtgaaatagaccgggcaaggagcgagccgataaaagcgttccccctcgggatgatcctgaaagcatgcccgaccattggcaactatgggccgagcggtgcggttgctagctggcgtgacctcatgtcggctgcggtggtggttcggtctatgctgggggtcagcccgtcggcttaccaagacgcgtgtgaggcaatgggaccggagaatgcggcagcagcgatggcgtgcattttggagcgagcgaacttcatcaattcgcccgggggctatctccgagatctgacacggcggagcgagcttgggaagttttcacttggcccgatgataatggcgctcttgaaggctagcgggcaggggacgttgcggtttggctagaattagcgagtatgggcgcgccggaaaatatgcatggcatgcccgttccatacagaagctgggcgaacaaacgatgctcgccttccagaaaaccgaggatgcgaaccacttcatccggggtcagcaccaccggcaagcgccgcgacggccgaggtcttccgatctcctgaagccagggcagatccgtgcacagcaccttgccgtagaagaacagcaaggccgccaatgcctgacgatgcgtggagaccgaaaccttgcgctcgttcgccagccaggacagaaatgcctcgacttcgctgctgcccaaggttgccgggtgacgcacaccgtggaaacggatgaaggcacgaacccagtggacataagcctgttcggttcgtaagctgtaatgcaagtagcgtatgcgctcacgcaactggtccagaaccttgaccgaacgcagcggtggtaacggcgcagtggcggttttcatggcttgttatgactgtttttttggggtacagtctatgcctcgggcatccaagcagcaagcgcgttacgccgtgggtcgatgtttgatgttatggagcagcaacgatgttacgcagcagggcagtcgccctaaaacaaagttaaacatcatgagggaagcggtgatcgccgaagtatcgactcaactatcagaggtagttggcgtcatcgagcgccatctcgaaccgacgttgctggccgtacatttgtacggctccgcagtggatggcggcctgaagccacacagtgatattgatttgctggttacggtgacggtaaggcttgatgaaacaacgcggcgagctttgatcaacgaccttttggaaacttcggcttcccctggagagagcgagattctccgcgctgtagaagtcaccattgttgtgcacgacgacatcattccgtggcgttatccagctaagcgcgaactgcaatttggagaatggcagcgcaatgacattcttgcaggtatcttcgagccagccacgatcgacattgatctggctatcttgctgacaaaagcaagagaacatagcgttgccttggtaggtccagcggcggaggaactctttgatccggttcctgaacaggatctatttgaggcgctaaatgaaaccttaacgctatggaactcgccgcccgactgggctggcgatgagcgaaatgtagtgcttacgttgtcccgcatttggtacagcgcagtaaccggcaaaatcgcgccgaaggatgtcgctgccgactgggcaatggagcgcctgccggcccagtatcagcccgtcatacttgaagctagacaggcttatcttggacaagaagaagatcgcttggcctcgcgcgcagatcagttggaagaatttgtccactacgtgaaaggcgagatcaccaaggtagtcggcaaataatgtctaacaattcgttcaagccgacgccgcttcgcggcgcggcttaactcaagcgttagatgcactatacgtaaccaactagtaggaacagtgaattggagttcgtcttgttataattagcttcttgggggatctttaaatactgtagaaaagaggaaggaaataataaatggctaaaatgagaatatcaccggaattgaaaaaactgatcgaaaaataccgctgcgtaaaagatacggaaggaatgtctcctgctaaggtatataagctggtgggagaaaatgaaaacctatatttaaaaatgacggacagccggtataaagggaccacctatgatgtggaacgggaaaaggacatgatgctatggctggaaggaaagctgcctgttccaaaggtcctgcactttgaacggcatgatggctggagcaatctgctcatgagtgaggccgatggcgtcctttgctcggaagagtatgaagatgaacaaagccctgaaaagattatcgagctgtatgcggagtgcatcaggctctttcactccatcgacatatcggattgtccctatacgaatagcttagacagccgcttagccgaattggattacttactgaataacgatctggccgatgtggattgcgaaaactgggaagaagacactccatttaaagatccgcgcgagctgtatgattttttaaagacggaaaagcccgaagaggaacttgtcttttcccacggcgacctgggagacagcaacatctttgtgaaagatggcaaagtaagtggctttattgatcttgggagaagcggcagggcggacaagtggtatgacattgccttctgcgtccggtcgatcagggaggatatcggggaagaacagtatgtcgagctattttttgacttactggggatcaagcctgattgggagaaaataaaatattatattttactggatgaattgttttagtacctagatacttcgctcgtgaaaagcagcgctcagggggctagtgcgctcttccgcttcctcgctcactgactcgctgcgctcggtcgttcggctgcggcgagcggtatcagctcactcaaaggcggtaatacggttatccacagaatcaggggataacgcaggaaagaacatgtgagcaaaaggccagcaaaaggccaggaaccgtaaaaaggccgcgttgctggcgtttttccataggctccgcccccctgacgagcatcacaaaaatcgacgctcaagtcagaggtggcgaaacccgacaggactataaagataccaggcgtttccccctggaagctccctcgtgcgctctcctgttccgaccctgccgcttaccggatacctgtccgcctttctcccttcgggaagcgtggcgctttctcatagctcacgctgtaggtatctcagttcggtgtaggtcgttcgctccaagctgggctgtgtgcacgaaccccccgttcagcccgaccgctgcgccttatccggtaactatcgtcttgagtccaacccggtaagacacgacttatcgccactggcagcagccactggtaacaggattagcagagcgaggtatgtaggcggtgctacagagttcttgaagtggtggcctaactacggctacactagaagaacagtatttggtatctgcgctctgctgaagccagttaccttcggaaaaagagttggtagctcttgatccggcaaacaaaccaccgctggtagcggtggtttttttgtttgcaagcagcagattacgcgcagaaaaaaaggatctcaagaagatcctttgatcttttctacggggtctgacgctcagtggaacgaaaactcacgttaagggattttggtcatgagattatcaaaaaggatcttcacctagatccttttaaattaaaaatgaagcgtacgttggaatcgcttctacaaatgacaggatatattggcgggtaaacctcacagccgcacttgaccgcggatggagccggagctgtggtgaggccatcgacgggaggtgggggagaacacagtctcagtgttctttgtgagtccgcaaggtttttagcttttctgtattaattaaggttgctgttggctgtagaatacggtcgtggaagagctgtatcggtagctactacgtaagctattatatactggaagtctggagctcgtcgatctccggtcgtcttcctccatttctcctcgtcttgctttgactgctgctaccatttgcttctgttttctgatgaagcatgccatgtcggccaccagtgtttgtgtggtttttgcagggaatggctttcaagtgctgtgattgaatggccctcgtcgtcctcggctgagctcacatggacgcgtcatgtgagtgagatatatgatcatatgatgagtggggttcgggtgagtgcgtacttgaagtaggatcccgctttcactcattcattcattggcctttaaaccgggaaattttcgcgaggagatggagggaagcaagcagggtgacgagtgcagagtgccgcgagcgctttgtcaaaaggcaccgccgtaggcaaaaaaatcaatggccctgactgactcgatggtagtactactgtagagactagagagggttgctccccatatcttcgtgtgacttttactccagcattgcatttccgtcattgagacgttaattaatagcagctttcgggacagatgactgtggccatgtttcgtcacggccgcttcgtgccagctgggggtactatagtactgtgattttgttagtaaaaactttcattaggccaccattgacgaccgggccttcgcttttgctgcgctaattaaccatttcccggcgaccgaagggaacatgaacatgccccgacacatgagggcatgaggactagtgttctccctgtcgttcgttgacttgactagtgatagtttaaacgctcttcaactggaagagcggttactaccggttcactagctagctgctaagcgactaattaactagctgtcccacggcctaactagcacttaatcccctagcctaacctaagagcgctaatctaggctagtggtcacttagggctttaagcttaagggtcacctttgtccaccaagatggaactgtcttcggccagaatggccatctggattcagcaggcctagaaggccatttatcgctatcaactttgtatagaaaagttgggccgagctcggtacggccagaatggcccggaccgggttaccaagcggccgcatcgagcagctggcttgtggggaccagacaaaaaaggaatggtgcagaattgttaggcgcacctaccaaaagcatctttgcctttattgcaaagataaagcagattcctctagtacaagtggggaacaaaataacgtggaaaagagctgtcctgacagcccactcactaatgcgtatgacgaacgcagtgacgaccacaaaactcgagcaacgagatcatgagccaatcaaagaggagtgatgtagacctaaagcaataatggagccatgacgtaagggcttacgcccatacgaaataattaaaggctgatgtgacctgtcggtctctcagaacctttactttttatgtttggcgtgtatttttaaatttccacggcaatgacgatgtgaccgtcgacccactaaaacattgctttgtcaaaagctaaaaaagatgatgcccgacagccacttgtgtgaagcatgagaagccggtccctccactaagaaaattagtgaagcatcttccagtggtccctccactcacagctcaatcagtgagcaacaggacgaaggaaatgacgtaagccatgacgtctaatcccagggcccggtgaccaatcgaattcttaccctagctccctgcggctgttacgcggtcccccatcaatcttctgttcttgcggttgtagcctgtgtaacagtgctagagtatgtatgataaataggttttaagtctgcttacatgacattttttattgtggaagagacatataaaaattagagagagtggttctcatgcaacggcggacggcccggtgctaaaagagcttcaagacaaaataatgaaacaggaagagagtagatttatctaagagccaactttattatatgaatgtgtttattgttggctttagatgatatggtaaggagttagagctaataatagataggctctattattattattattaattaaactcgctctaaggaggaaagtgggaggaagggacgaggacgaagactactggaagcatcgtgcatggatgatggatgtggtgtctcttaatgtaggtggccggaggatgtacgtgttaattgcgcgataagcactcagatccaaccgcaaactacctccacactgacacactgatagagagaaagagagacctccgacgactgccgccgcagatgagccacgtacgtatacgacgtctgccggccggctcaggctgccgccatcaccctgctcgaaagtcgcgttaggcggcgccagctacataggagtatctagtctagccagttagtatactactactgcgctgatgatgaattaactctgcatagatactgtacttgcctccctccaacacccaaccacctcctgctcggctcttaataacttggacacggatcgatgccatccaaggaagaacacgacgacgacgacggaacatccaccatgcaagcttgcatccatacgccgatacgcgtgcatccatccatccaccattatttccattttccaccgatcacacgtacacaggcctatttaaggagcgacatcccactgcaactctcctcaccactcatcaccagctagctctagcaaagcacttgccatctaccgaccgccgcattccaaacagcccgacgagctagcagagcggcaggcacctccctcctcaaggaacccatggcggccaatgcgggcggcggtggagcgggaggaggcagcggcagcggcagcgtggctgcgccggcggtgtgccgccccagcggctcgcggtggacgccgacgccggagcagatcaggatgctgaaggagctctactacggctgcggcatccggtcgcccagctcggagcagatccagcgcatcaccgccatgctgcggcagcacggcaagatcgagggcaagaacgtcttctactggttccagaaccacaaggcccgcgagcgccagaagcgccgcctcaccagcctcgacgtcaacgtgcccgccgccggcgcggccgacgccaccaccagccaactcggcgtcctctcgctgtcgtcgccgccgccttcaggcgcggcgcctccctcgcccaccctcggcttctacgccgccggcaatggcggcggatcggctgtgctgctggacacgagttccgactggggcagcagcggcgctgctatggccaccgagacatgcttcctgcaggactacatgggcgtgacggacacgggcagctcgtcgcagtggccacgcttctcgtcgtcggacacgataatggcggcggccgcggcgcgggcggcgacgacgcgggcgcccgagacgctccctctcttcccgacctgcggcgacgacggcggcagcggtagcagcagctacttgccgttctggggtgccgcgtccacaactgccggcgccacttcttccgttgcgatccaacagcaacaccagctgcaggagcagtacagcttttacagcaacagcaacagcacccagctggccggcaccggcaaccaagacgtatcggcaacagcagcagcagccgccgccctggagctgagcctcagctcatggtgctccccttaccctgctgcagggagtatgtgagagcaacgcgagctgccactgctcttcactgatgtctctggaatggaaggaggaggaagtgagaacagatcattcgacaaagcagcattagtccgttgatcggtggaagaccactcgtcagtgttgagttgaatgtttgatcaataaaatacggcaatgctgtaagggttgttttttatgccattgataatacactgtactgttcagttgttgaactctatttcttagccatgccaagtgcttttcttattttgaataacattacagcaaaaagttgaaagacaaaaaaaaaaacccccgaacagagtgctttgggtcccaagcttctttagactgtgttcggcgttccccctaaatttctccccctatatctcactcacttgtcacatcagcgttctctttccccctatatctccacgctctacagcagttccacctatatcaaacctctataccccaccacaacaatattatatactttcatcttcaactaactcatgtaccttccaatttttttctactaataattatttacgtgcacagaaacttagcaaggagagagagagcgggaatttaaatgctcggcgttaggcttttagtccgctaggtggctagaccgaggttaggacgctagttcactaggggcctagtggtgttttaagacgtcacggtcacccggtccgggcctagaaggccagcttcaagtttgtacaaaaaagcaggctccggccagaatggcccggaccgaagcttgcatgcctgcagtgcagcgtgacccggtcgtgcccctctctagagataatgagcattgcatgtctaagttataaaaaattaccacatattttttttgtcacacttgtttgaagtgcagtttatctatctttatacatatatttaaactttactctacgaataatataatctatagtactacaataatatcagtgttttagagaatcatataaatgaacagttagacatggtctaaaggacaattgagtattttgacaacaggactctacagttttatctttttagtgtgcatgtgttctcctttttttttgcaaatagcttcacctatataatacttcatccattttattagtacatccatttagggtttagggttaatggtttttatagactaatttttttagtacatctattttattctattttagcctctaaattaagaaaactaaaactctattttagtttttttatttaataatttagatataaaatagaataaaataaagtgactaaaaattaaacaaataccctttaagaaattaaaaaaactaaggaaacatttttcttgtttcgagtagataatgccagcctgttaaacgccgtcgacgagtctaacggacaccaaccagcgaaccagcagcgtcgcgtcgggccaagcgaagcagacggcacggcatctctgtcgctgcctctggacccctctcgagagttccgctccaccgttggacttgctccgctgtcggcatccagaaattgcgtggcggagcggcagacgtgagccggcacggcaggcggcctcctcctcctctcacggcaccggcagctacgggggattcctttcccaccgctccttcgctttcccttcctcgcccgccgtaataaatagacaccccctccacaccctctttccccaacctcgtgttgttcggagcgcacacacacacaaccagatctcccccaaatccacccgtcggcacctccgcttcaaggtacgccgctcgtcctcccccccccccctctctaccttctctagatcggcgttccggtccatgcatggttagggcccggtagttctacttctgttcatgtttgtgttagatccgtgtttgtgttagatccgtgctgctagcgttcgtacacggatgcgacctgtacgtcagacacgttctgattgctaacttgccagtgtttctctttggggaatcctgggatggctctagccgttccgcagacgggatcgatttcatgattttttttgtttcgttgcatagggtttggtttgcccttttcctttatttcaatatatgccgtgcacttgtttgtcgggtcatcttttcatgcttttttttgtcttggttgtgatgatgtggtctggttgggcggtcgttctagatcggagtagaattctgtttcaaactacctggtggatttattaattttggatctgtatgtgtgtgccatacatattcatagttacgaattgaagatgatggatggaaatatcgatctaggataggtatacatgttgatgcgggttttactgatgcatatacagagatgctttttgttcgcttggttgtgatgatgtggtgtggttgggcggtcgttcattcgttctagatcggagtagaatactgtttcaaactacctggtgtatttattaattttggaactgtatgtgtgtgtcatacatcttcatagttacgagtttaagatggatggaaatatcgatctaggataggtatacatgttgatgtgggttttactgatgcatatacatgatggcatatgcagcatctattcatatgctctaaccttgagtacctatctattataataaacaagtatgttttataattattttgatcttgatatacttggatgatggcatatgcagcagctatatgtggatttttttagccctgccttcatacgctatttatttgcttggtactgtttcttttgtcgatgctcaccctgttgtttggtgttacttctgcaggtcgactttaacttagcctaggatccatggcaccgaagaagaagcgcaaggtgatggacaagaagtacagcatcggcctcgacatcggcaccaactcggtgggctgggccgtcatcacggacgaatataaggtcccgtcgaagaagttcaaggtcctcggcaatacagaccgccacagcatcaagaaaaacttgatcggcgccctcctgttcgatagcggcgagaccgcggaggcgaccaggctcaagaggaccgccaggagacggtacactaggcgcaagaacaggatctgctacctgcaggagatcttcagcaacgagatggcgaaggtggacgactccttcttccaccgcctggaggaatcattcctggtggaggaggacaagaagcatgagcggcacccaatcttcggcaacatcgtcgacgaggtaagtttctgcttctacctttgatatatatataataattatcattaattagtagtaatataatatttcaaatatttttttcaaaataaaagaatgtagtatatagcaattgcttttctgtagtttataagtgtgtatattttaatttataacttttctaatatatgaccaaaacatggtgatgtgcaggtggcctaccacgagaagtacccgacaatctaccacctccggaagaaactggtggacagcacagacaaggcggacctccggctcatctaccttgccctcgcgcatatgatcaagttccgcggccacttcctcatcgagggcgacctgaacccggacaactccgacgtggacaagctgttcatccagctcgtgcagacgtacaatcaactgttcgaggagaaccccataaacgctagcggcgtggacgccaaggccatcctctcggccaggctctcgaaatcaagaaggctggagaaccttatcgcgcagttgccaggcgaaaagaagaacggcctcttcggcaaccttattgcgctcagcctcggcctgacgccgaacttcaaatcaaacttcgacctcgcggaggacgccaagctccagctctcaaaggacacctacgacgacgacctcgacaacctcctggcccagataggagaccagtacgcggacctcttcctcgccgccaagaacctctccgacgctatcctgctcagcgacatccttcgggtcaacaccgaaattaccaaggcaccgctgtccgccagcatgattaaacgctacgacgagcaccatcaggacctcacgctgctcaaggcactcgtccgccagcagctccccgagaagtacaaggagatcttcttcgaccaatcaaaaaacggctacgcgggatatatcgacggcggtgccagccaggaagagttctacaagttcatcaaaccaatcctggagaagatggacggcaccgaggagttgctggtcaagctcaacagggaggacctcctcaggaagcagaggaccttcgacaacggctccatcccgcatcagatccacctgggcgaactgcatgccatcctgcggcgccaggaggacttctacccgttcctgaaggataaccgggagaagatcgagaagatcttgacgttccgcatcccatactacgtgggcccgctggctcgcggcaactcccggttcgcctggatgacccggaagtcggaggagaccatcacaccctggaactttgaggaggtggtcgataagggcgctagcgctcagagcttcatcgagcgcatgaccaacttcgataaaaacctgcccaatgaaaaagtcctccccaagcactcgctgctctacgagtacttcaccgtgtacaacgagctcaccaaggtcaaatacgtcaccgagggcatgcggaagccggcgttcctgagcggcgagcagaagaaggcgatagtggacctcctcttcaagaccaacaggaaggtgaccgtgaagcaattaaaagaggactacttcaagaaaatagagtgcttcgactccgtggagatctcgggcgtggaggatcggttcaacgcctcactcggcacgtatcacgacctcctcaagatcattaaagacaaggacttcctcgacaacgaggagaacgaggacatcctcgaggacatcgtcctcaccctgaccctgttcgaggaccgcgaaatgatcgaggagaggctgaagacctacgcgcacctgttcgacgacaaggtcatgaaacagctcaagaggcgccgctacactggttggggaaggctgtcccgcaagctcattaatggcatcagggacaagcagagcggcaagaccatcctggacttcctcaagtccgacgggttcgccaaccgcaacttcatgcagctcattcacgacgactcgctcacgttcaaggaagacatccagaaggcacaggtgagcgggcagggtgactccctccacgaacacatcgccaacctggccggctcgccggccattaaaaagggcatcctgcagacggtcaaggtcgtcgacgagctcgtgaaggtgatgggccggcacaagcccgaaaatatcgtcatagagatggccagggagaaccagaccacccaaaaagggcagaagaactcgcgcgagcggatgaaacggatcgaggagggcattaaagagctcgggtcccagatcctgaaggagcaccccgtggaaaatacccagctccagaatgaaaagctctacctctactacctgcagaacggccgcgacatgtacgtggaccaggagctggacattaatcggctatcggactacgacgtcgaccacatcgtgccgcagtcgttcctcaaggacgatagcatcgacaacaaggtgctcacccggtcggataaaaatcggggcaagagcgacaacgtgcccagcgaggaggtcgtgaagaagatgaaaaactactggcgccagctcctcaacgcgaaactgatcacccagcgcaagttcgacaacctgacgaaggcggaacgcggtggcttgagcgaactcgataaggcgggcttcataaaaaggcagctggtcgagacgcgccagatcacgaagcatgtcgcccagatcctggacagccgcatgaatactaagtacgatgaaaacgacaagctgatccgggaggtgaaggtgatcacgctgaagtccaagctcgtgtcggacttccgcaaggacttccagttctacaaggtccgcgagatcaacaactaccaccacgcccacgacgcctacctgaatgcggtggtcgggaccgccctgatcaagaagtacccgaagctggagtcggagttcgtgtacggcgactacaaggtctacgacgtgcgcaaaatgatcgccaagtccgagcaggagatcggcaaggccacggcaaaatacttcttctactcgaacatcatgaacttcttcaagaccgagatcaccctcgcgaacggcgagatccgcaagcgcccgctcatcgaaaccaacggcgagacgggcgagatcgtctgggataagggccgggatttcgcgacggtccgcaaggtgctctccatgccgcaagtcaatatcgtgaaaaagacggaggtccagacgggcgggttcagcaaggagtccatcctcccgaagcgcaactccgacaagctcatcgcgaggaagaaggattgggacccgaaaaaatatggcggcttcgacagcccgaccgtcgcatacagcgtcctcgtcgtggcgaaggtggagaagggcaagtcaaagaagctcaagtccgtgaaggagctgctcgggatcacgattatggagcggtcctccttcgagaagaacccgatcgacttcctagaggccaagggatataaggaggtcaagaaggacctgattattaaactgccgaagtactcgctcttcgagctggaaaacggccgcaagaggatgctcgcctccgcaggcgagttgcagaagggcaacgagctcgccctcccgagcaaatacgtcaatttcctgtacctcgctagccactatgaaaagctcaagggcagcccggaggacaacgagcagaagcagctcttcgtggagcagcacaagcattacctggacgagatcatcgagcagatcagcgagttctcgaagcgggtgatcctcgccgacgcgaacctggacaaggtgctgtcggcatataacaagcaccgcgacaaaccaatacgcgagcaggccgaaaatatcatccacctcttcaccctcaccaacctcggcgctccggcagccttcaagtacttcgacaccacgattgaccggaagcggtacacgagcacgaaggaggtgctcgatgcgacgctgatccaccagagcatcacagggctctatgaaacacgcatcgacctgagccagctgggcggagacaagagaccacgggaccgccacgatggcgagctgggaggccgcaagcgggcaaggtaggtaccgccgtgggtcgtttaagctgccgctgtacctgtgtcgtctggtgccttctggtgtacctgggaggttgtcgtctatcaagtatctgtggttggtgtcatgagtcagtgagtcccaatactgttcgtgtcctgtgtgcattatacccaaaactgttatgggcaaatcatgaataagcttgatgttcgaacttaaaagtctctgctcaatatggtattatggttgtttttgttcgtctcctaatatttgcctgggatcaaattttattggctggtgttcatttgacctccatgttcttgctaggctccattttttactctacagccataatatgtttgattgtttggtttgttctttgttgtacacctggttctgtcgagcttagttttcgacactggcttacagcttaacatgttgctattttattgggttctgattgctattttattgggttctgattgctagtttttgctgaatccaaaaaccatgttatttatttaagcgatccaggttattattatgatggtggctaagtttttttttttccaagggtaaattttctggattctccagtgtttctgtggccgaattcaccggtgttaacggcaaacgctaattagtcactaggcccaggaaacactaactaagccctagcttatcctagcgcaacctagttaggtcttggttaccgtgagagtacaatgatgaacctagattaatcaatgccaaagtctgaaaaatgcaccctcagtctatgatccagaaaatcaagattgcttgaggccctgttcggttgttccggattagagccccggattaattcctagccggattacttctctaatttatatagattttgatgagctggaatgaatcctggcttattccggtacaaccgaacaggccctgaaggataccagtaatcgctgagctaaattggcatgctgtcagagtgtcagtattgcagcaaggtagtgagataaccggcatcatggtgccagtttgatggcaccattagggttagagatggtggccatgggcgcatgtcctggccaactttgtatgatatatggcagggtgaataggaaagtaaaattgtattgtaaaaagggatttcttctgtttgttagcgcatgtacaaggaatgcaagttttgagcgagggggcatcaaagatctggctgtgtttccagctgtttttgttagccccatcgaatccttgacataatgatcccgcttaaataagcaacctcgcttgtatagttccttgtgctctaacacacgatgatgataagtcgtaaaatagtggtgtccaaagaatttccaggcccagttgtaaaagctaaaatgctattcgaatttctactagcagtaagtcgtgtttagaaattatttttttatataccttttttccttctatgtacagtaggacacagtgtcagcgccgcgttgacggagaatatttgcaaaaaagtaaaagagaaagtcatagcggcgtatgtgccaaaaacttcgtcacagagagggccataagaaacatggcccacggcccaatacgaagcaccgcgacgaagcccaaacagcagtccgtaggtggagcaaagcgctgggtaatacgcaaacgttttgtcccaccttgactaatcacaagagtggagcgtaccttataaaccgagccgcaagcaccgaattgcataatgaggatcgaggatggttttagagctagaaatagcaagttaaaataaggctagtccgttatcaacttgaaaaagtggcaccgagtcggtgctttttttttgacgtctaaaaacggcccctaactaacgcttagttgcccgctagattagtcccccgttagtgcctagttagacacacgacgaactaggggctagcccgggcatcggatcccgggcacccagctttcttgtacaaagtggccgttaacggatcggccagaatggcccggaccgaagccgaggccggccacactgatagtttaaactgaaggcgggaaacgacaatctgatcatgagcggagaattaagggagtcacgttatgacccccgccgatgacgcgggacaagccgttttacgtttggaactgacagaaccgcaacgattgaaggagccactcagccgcgggtttctggagtttaatgagctaagcacatacgtcagaaaccattattgcgcgttcaaaagtcgcctaaggtcactatcagctagcaaatatttcttgtcaaaaatgctccactgacgttccataaattcccctcggtatccaattagagtctcatattcactctcccggcggatctcgactctagaggatcgctcaggaaggccgctgagatagagccatggggaggagggcgtgttgcgcgaaggaaggcgttaagagaggggcgtggacgagcaaggaggacgatgccttggccgcctacgtcaaggcccacggcgaaggcaaatggagggaagtgccccagaaagccggtttgcgtcggtgcggcaagagctgccggctgcggtggctgaactacctccggcccaacatcaggcgcggcaacatctcctacgacgaggaggatctcatcatccgcctccacaggctcctcggcaacaggtggtcgctgattgcaggcaggctgcctggccgaacagacaatgaaatcaagaactactggaacagcacgctgggccggagggcaggcgccggcgccggcgccggcggcagatccacgatggcgctttcagcttcccgagttcagcaggcggaagaactgctgcaacgacctgctgagaggcagctgatgaggagccagcttgctgcagccgccaggagcatcaactggagctacgccctcttctggtccatttcagacactcaaccaggggtgctgacgtggacggacgggttctacaacggcgaggtgaagacgcggaagatttccaactccgtggagctgacatccgaccagctcgtcatgcagaggagcgaccagctccgggagctctacgaggccctcctgtcgggcgagggcgaccgccgcgctgcgcctgcgcggccggccggctctctgtcgccggaggacctcggcgacaccgagtggtactacgtggtgtccatgacctacgccttccggccaggccaagggttgcccggcaggagtttcgcgagcgacgagcatgtctggctgtgcaacgcgcacctcgccggcagcaaagccttcccccgcgcgctcctcgccaagagcgcgtccattcagtcaatcctctgcatcccggttatgggcggcgtgcttgagcttggtacaactgacacggtgccggaggccccggacttggtcagccgagcaaccgcggctttctgggagccgcagtgcccgagctccagcccgtcaggacgagcaaacgagacgggcgaggccgcagcagacgacggcacgtttgcgttcgaggaactcgaccacaataatggcatggacgacatagaggcgatgaccgccgccgggggacacgggcaggaggaggagctaagactaagagaagccgaggccctgtcagacgacgcaagcctggagcacatcaccaaggagatcgaggagttctacagcctctgcgacgaaatggacctgcaggcgctaccactaccgctagaggacggctggaccgtggacgcgtccaatttcgaggtcccctgctcttccccgcagccagcgccgcctccggtggatagggctaccgctaacgtcgccgccgacgcctcaagggcacccgtctacggctctcgcgcgacgagtttcatggcttggacgaggtcctcgcagcagtcgtcgtgctccgacgacgcggcgcccgcagcagtagtgccggccatcgaggagccgcagagattgctgaagaaagtggtggccggcggcggtgcttgggagagctgtggcggcgcgacgggagcagcacaggaaatgagtggcactggcaccaagaaccacgtcatgtcggagcgaaagcgacgagagaagctcaacgagatgttcctcgtcctcaagtcactgcttccgtccattcacagggtgaacaaagcgtcgatcctcgccgaaacgatagcctacctcaaggagcttcagagaagggtgcaagagctggagtccagtagggaacctgcgtcgcgcccatccgaaacgacgacaaggctaataacaaggccctcccgtggcaataatgagagtgtgaggaaggaggtctgcgcgggctccaagaggaagagcccagagctcggcagagacgacgtggagcgccccccggtcctcacgatggacgccggcaccagcaacgtcaccgtcaccgtctcggacaaggatgtgctcctggaggtgcagtgccggtgggaggagctcctgatgacgcgagtgttcgacgccatcaagagcctccatttggacgtcctctcggttcaggcttcagcgccagatggcttcatggggcttaagatacgagctcagtttgctggctccggtgccgtcgtgccctggatgatcagcgaggctcttcgcaaagctatagggaacccctgggtcgtcgtcgcgccggacaccggctcgcacgccaccccggccgcgacgtcgggcgcctgcgagacgggccagaatagcgccgctcatcgcgcggaccccgactcagccgggacgacgacgacctcggcggcggcggtgtgggcgcccaaggccgtgcggtgcacgggcggactcttcttcttccaccgggacacgacgccggcgcacgcgggcgagacggcgacgccaatggccggtggaggtggaggaggaggaggagaagcagggtcgtcggacgactgcagctcggcggcgtcggtatcgcttcgcgtcggaagccacgacgagccgtgcttctccggcgacggtgacggcgactggatggacgacgtgagggccctggcgtcgtttctggagtccgacgaggactggctccgctgtcagacggccgggcagcttgcgtagtggccaggtaccactaactatctatactgtaataatgttgtatagccgccggatagctagctagtttagtcattcagcggcgatgggtaataataaagtgtcatccatccatcaccatgcgtggcaacgtgagcaatgacctgattgaacaaattgaaatgaaaagaagaaatatgttatatgtcaacgagatttcctcataatgccactgacgacgtgtgtccaagaaatgtatcagtgatacgtatattcacaatttttttatgacttatactcacaatttgtttttttactacttatactcacaatttgttgtgcgtaccataacaatttcgatcgaatatatatcagaaagttgacgaaagtaagctcactcaaaaagttaaatgggctgcggaagctgcgtcaggcccaagttttggctattctatccggtatccacgattttgatggctgagggacatatgttcgcttaagcttggcgcgccggtcacccggtccgggcctagaaggccagcttcggccgccccgggcaactttattatacaaagttgatagataaatcagatatctggttcctaaggacccgtgtacacctgagcctaactaactaggcctctaacacgctaaccccttagagagttcctaacgccctagactagttcaataagtcggcctaactaaactggctaacggtaccgagctcgaattcattccgattaatcgtggcctcttgctcttcaggatgaagagctatgtttaaacgtgcaagcgctactagacaattcagtacattaaaaacgtccgcaatgtgttattaagttgtctaagcgtcaatttgtttacaccacaatatatcctgccaccagccagccaacagctccccgaccggcagctcggcacaaaatcaccactaaatgccagcggcg

SEQ ID NO: 14 - DNA, 15679 bp, Artificial sequence
  Synthetic
gttaccgcacccggagcgggcgcgaggccgccaaggcccgaggcgtgaagtttggcccccgccctaccctcaccccggcacagatcgcgcacgcccgcgagctgatcgaccaggaaggccgcaccgtgaaagaggcggctgcactgcttggcgtgcatcgctcgaccctgtaccgcgcacttgagcgcagcgaggaagtgacgcccaccgaggccaggcggcgcggtgccttccgtgaggacgcattgaccgaggccgacgccctggcggccgccgagaatgaacgccaagaggaacaagcatgaaaccgcaccaggacggccaggacgaaccgtttttcattaccgaagagatcgaggcggagatgatcgcggccgggtacgtgttcgagccgcccgcgcacgtctcaaccgtgcggctgcatgaaatcctggccggtttgtctgatgccaagctggcggcctggccggccagcttggccgctgaagaaaccgagcgccgccgtctaaaaaggtgatgtgtatttgagtaaaacagcttgcgtcatgcggtcgctgcgtatatgatgcgatgagtaaataaacaaatacgcaaggggaacgcatgaaggttatcgctgtacttaaccagaaaggcgggtcaggcaagacgaccatcgcaacccatctagcccgcgccctgcaactcgccggggccgatgttctgttagtcgattccgatccccagggcagtgcccgcgattgggcggccgtgcgggaagatcaaccgctaaccgttgtcggcatcgaccgcccgacgattgaccgcgacgtgaaggccatcggccggcgcgacttcgtagtgatcgacggagcgccccaggcggcggacttggctgtgtccgcgatcaaggcagccgacttcgtgctgattccggtgcagccaagcccttacgacatatgggccaccgccgacctggtggagctggttaagcagcgcattgaggtcacggatggaaggctacaagcggcctttgtcgtgtcgcgggcgatcaaaggcacgcgcatcggcggtgaggttgccgaggcgctggccgggtacgagctgcccattcttgagtcccgtatcacgcagcgcgtgagctacccaggcactgccgccgccggcacaaccgttcttgaatcagaacccgagggcgacgctgcccgcgaggtccaggcgctggccgctgaaattaaatcaaaactcatttgagttaatgaggtaaagagaaaatgagcaaaagcacaaacacgctaagtgccggccgtccgagcgcacgcagcagcaaggctgcaacgttggccagcctcgcagacacgccagccatgaagcgggtcaactttcagttgccggcggaggatcacaccaagctgaagatgtacgcggtacgccaaggcaagaccattaccgagctgctatctgaatacatcgcgcagctaccagagtaaatgagcaaatgaataaatgagtagatgaattttagcggctaaaggaggcggcatggaaaatcaagaacaaccaggcaccgacgccgtggaatgccccatgtgtggaggaacgggcggttggccaggcgtaagcggctgggttgcctgccggccctgcaatggcactggaacccccaagcccgaggaatcggcgtgagcggtcgcaaaccatccggcccggtacaaatcggcgcggcgctgggtgatgacctggtggagaagttgaaggcagcgcaggccgcccagcggcaacgcatcgaggcagaagcacgccccggtgaatcgtggcaagcagccgctgatcgaatccgcaaagaatcccggcaaccgccggcagccggtgcgccgtcgattaggaagccgcccaagggcgacgagcaaccagattttttcgttccgatgctctatgacgtgggcacccgcgatagtcgcagcatcatggacgtggccgttttccgtctgtcgaagcgtgaccgacgagctggcgaggtgatccgctacgagcttccagacgggcacgtagaggtttccgcagggccggcaggcatggccagtgtgtgggattacgacctggtactgatggcggtttcccatctaaccgaatccatgaaccgataccgggaagggaagggagacaagcccggccgcgtgttccgtccacacgttgcggacgtactcaagttctgccggcgagccgatggcggaaagcagaaagacgacctggtagaaacctgcattcggttaaacaccacgcacgttgccatgcagcgtacgaagaaggccaagaacggccgcctggtgacggtatccgagggtgaagccttgattagccgctacaagatcgtaaagagcgaaaccgggcggccggagtacatcgagatcgagctagctgattggatgtaccgcgagatcacagaaggcaagaacccggacgtgctgacggttcaccccgattactttttgatcgatcccggcatcggccgttttctctaccgcctggcacgccgcgccgcaggcaaggcagaagccagatggttgttcaagacgatctacgaacgcagtggcagcgccggagagttcaagaagttctgtttcaccgtgcgcaagctgatcgggtcaaatgacctgccggagtacgatttgaaggaggaggcggggcaggctggcccgatcctagtcatgcgctaccgcaacctgatcgagggcgaagcatccgccggttcctaatgtacggagcagatgctagggcaaattgccctagcaggggaaaaaggtcgaaaaggtctctttcctgtggatagcacgtacattgggaacccaaagccgtacattgggaaccggaacccgtacattgggaacccaaagccgtacattgggaaccggtcacacatgtaagtgactgatataaaagagaaaaaaggcgatttttccgcctaaaactctttaaaacttattaaaactcttaaaacccgcctggcctgtgcataactgtctggccagcgcacagccgaagagctgcaaaaagcgcctacccttcggtcgctgcgctccctacgccccgccgcttcgcgtcggcctatggcgcgccggaaaatatgcatggcatgcccgttccatacagaagctgggcgaacaaacgatgctcgccttccagaaaaccgaggatgcgaaccacttcatccggggtcagcaccaccggcaagcgccgcgacggccgaggtcttccgatctcctgaagccagggcagatccgtgcacagcaccttgccgtagaagaacagcaaggccgccaatgcctgacgatgcgtggagaccgaaaccttgcgctcgttcgccagccaggacagaaatgcctcgacttcgctgctgcccaaggttgccgggtgacgcacaccgtggaaacggatgaaggcacgaacgcttgagttaagccgcgccgcgaagcggcgtcggcttgaacgaattgttagacattattaggtggcggtacttgggtcgatatcaaagtgcatcacttcttcccgtatgcccaactttgtatagagagccactgcgggatcgtcaccgtaatctgcttgcacgtagatcacataagcaccaagcgcgttggcctcatgcttgaggagattgatgagcgcggtggcaatgccctgcctccggtgctcgccggagactgcgagatcatagatatagatctcactacgcggctgctcaaacttgggcagaacgtaagccgcgagagcgccaacaaccgcttcttggtcgaaggcagcaagcgcgatgaatgtcttactacggagcaagttcccgaggtaatcggagtccggctgatgttgggagtaggtggctacgtctccgaactcacgaccgaaaagatcaagagcagcccgcatggatttgacttggtcagggccgagcctacatgtgcgaatgatgcccatacttgagccacctaactttgttttagggcgactgccctgctgcgtaacatcgttgctgctgcgtaacatatgtttttcctccttatgttaagcttactcagttattatatcataaatatctgtgtcaagaataaactcccacatggattcggcatgccatgcatattggattggatctagatgcattcgcgaggtacactagtttccggcccagcttcccagtggacataagcctgttcggttatgtgagcaaaaggccagcaaaaggccaggaaccgtaaaaaggccgcgttgctggcgtttttccataggctccgcccccctgacgagcatcacaaaaatcgacgctcaagtcagaggtggcgaaacccgacaggactataaagataccaggcgtttccccctggaagctccctcgtgcgctctcctgttccgaccctgccgcttaccggatacctgtccgcctttctcccttcgggaagcgtggcgctttctcatagctcacgctgtaggtatctcagttcggtgtaggtcgttcgctccaagctgggctgtgtgcacgaaccccccgttcagcccgaccgctgcgccttatccggtaactatcgtcttgagtccaacccggtaagacacgacttatcgccactggcagcagccactggtaacaggattagcagagcgaggtatgtaggcggtgctacagagttcttgaagtggtggcctaactacggctacactagaagaacagtatttggtatctgcgctctgctgaagccagttaccttcggaaaaagagttggtagctcttgatccggcaaacaaaccaccgctggtagcggtggtttttttgtttgcaagcagcagattacgcgcagaaaaaaaggatctcaagaagatcctttgatcttttctacggggtctgacgctcagtggaacgaaaactcacgttaagggattttggtcatgagattatcaaaaaggatcttcacctagatccttttaaattaaaaatgaagcgtaccgacgatcttgctgcgttcggatattttcgtggagttcccgccacagacccggattgaaggcgagatccagcaactcgcgccagatcatcctgtgacggaactttggcgcgtgatgactggccaggacgtcggccgaaagagcgacaagcagatcacgcttttcgacagcgtcggatttgcgatcgaggatttttcggcgctgcgctacgtccgcgaccgcgttgagggatcaagccacagcagcccactcgaccttctagccgacccagacgagccaagggatctttttggaatgctgctccgtcgtcaggctttccgacgtttgggtggttgaacagaagtcattatcgcacggaatgccaagcactcccgaggggaaccctgtggttggcatgcacatacaaatggacgaacggataaaccttttcacgcccttttaaatatccgattattctaataaacgctcttttctcttaggtttacccgccaatatatcctgtcaaacactgcggccgcacttgaccgcggatggagccggagctgtggtgaggccatcgacgggaggtgggggagaacacagtctcagtgttctttgtgagtccgcaaggtttttagcttttctgtattaattaaggttgctgttggctgtagaatacggtcgtggaagagctgtatcggtagctactacgtaagctattatatactggaagtctggagctcgtcgatctccggtcgtcttcctccatttctcctcgtcttgctttgactgctgctaccatttgcttctgttttctgatgaagcatgccatgtcggccaccagtgtttgtgtggtttttgcagggaatggctttcaagtgctgtgattgaatggccctcgtcgtcctcggctgagctcacatggacgcgtcatgtgagtgagatatatgatcatatgatgagtggggttcgggtgagtgcgtacttgaagtaggatcccgctttcactcattcattcattggcctttaaaccgggaaattttcgcgaggagatggagggaagcaagcagggtgacgagtgcagagtgccgcgagcgctttgtcaaaaggcaccgccgtaggcaaaaaaatcaatggccctgactgactcgatggtagtactactgtagagactagagagggttgctccccatatcttcgtgtgacttttactccagcattgcatttccgtcattgagacgttaattaatagcagctttcgggacagatgactgtggccatgtttcgtcacggccgcttcgtgccagctgggggtactatagtactgtgattttgttagtaaaaactttcattaggccaccattgacgaccgggccttcgcttttgctgcgctaattaaccatttcccggcgaccgaagggaacatgaacatgccccgacacatgagggcatgaggactagtgttctccctgtcgttcgttgacttgactagtgatagtttaaacgctcttcaactggaagagcggttactaccggttcactagctagctgctaatcgagctagttaccctatgaggtgacatgaagcgctcacggttactatgacggttagcttcacgactgttggtggcagtagcgtacgacttagctatagttccggacttacccttaagataacttcgtatagcatacattatacgaagttatgggcccacgcgtgaagagcggttaccagagctggtcacctttgtccaccaagatggaactgtcttcggccagaatggccatctggattcagcaggcctagaaggccatttatcgctatcaactttgtatagaaaagttgggccagaatggcccggaccgggttaccaagcggccgcggaaaaccgtcgacctcgagagcatgcacggatagatggcgtctagcatatcgataggacatgacaagtggtacgatccccgtcacatgtccatggaggcatctgatatggacacggcgtgtatctatcgcggctggaacagaaccagcgctcgcgcggcggtcggcgggagggacagaccttggctccgtgcgttcaggttgtgcttgtgccgcgcgccacgcacggtctccgccgcctgcagctgaaattttagatttacatcctatccctttattttttttatttgtcacaattcagttcaaaaatgaagaacggaggtagtgcatcctttgtgagactaatgaaaatcacatctggatcctgaaatcggcgtcgtaacctacaaggccacggactggattagatagtggtccatggtgcataatgaggatcgaggcacggttacccggaccgaagcttgcatgcctgcagtgcagcgtgacccggtcgtgcccctctctagagataatgagcattgcatgtctaagttataaaaaattaccacatattttttttgtcacacttgtttgaagtgcagtttatctatctttatacatatatttaaactttactctacgaataatataatctatagtactacaataatatcagtgttttagagaatcatataaatgaacagttagacatggtctaaaggacaattgagtattttgacaacaggactctacagttttatctttttagtgtgcatgtgttctcctttttttttgcaaatagcttcacctatataatacttcatccattttattagtacatccatttagggtttagggttaatggtttttatagactaatttttttagtacatctattttattctattttagcctctaaattaagaaaactaaaactctattttagtttttttatttaataatttagatataaaatagaataaaataaagtgactaaaaattaaacaaataccctttaagaaattaaaaaaactaaggaaacatttttcttgtttcgagtagataatgccagcctgttaaacgccgtcgacgagtctaacggacaccaaccagcgaaccagcagcgtcgcgtcgggccaagcgaagcagacggcacggcatctctgtcgctgcctctggacccctctcgagagttccgctccaccgttggacttgctccgctgtcggcatccagaaattgcgtggcggagcggcagacgtgagccggcacggcaggcggcctcctcctcctctcacggcaccggcagctacgggggattcctttcccaccgctccttcgctttcccttcctcgcccgccgtaataaatagacaccccctccacaccctctttccccaacctcgtgttgttcggagcgcacacacacacaaccagatctcccccaaatccacccgtcggcacctccgcttcaaggtacgccgctcgtcctcccccccccccctctctaccttctctagatcggcgttccggtccatgcatggttagggcccggtagttctacttctgttcatgtttgtgttagatccgtgtttgtgttagatccgtgctgctagcgttcgtacacggatgcgacctgtacgtcagacacgttctgattgctaacttgccagtgtttctctttggggaatcctgggatggctctagccgttccgcagacgggatcgatttcatgattttttttgtttcgttgcatagggtttggtttgcccttttcctttatttcaatatatgccgtgcacttgtttgtcgggtcatcttttcatgcttttttttgtcttggttgtgatgatgtggtctggttgggcggtcgttctagatcggagtagaattctgtttcaaactacctggtggatttattaattttggatctgtatgtgtgtgccatacatattcatagttacgaattgaagatgatggatggaaatatcgatctaggataggtatacatgttgatgcgggttttactgatgcatatacagagatgctttttgttcgcttggttgtgatgatgtggtgtggttgggcggtcgttcattcgttctagatcggagtagaatactgtttcaaactacctggtgtatttattaattttggaactgtatgtgtgtgtcatacatcttcatagttacgagtttaagatggatggaaatatcgatctaggataggtatacatgttgatgtgggttttactgatgcatatacatgatggcatatgcagcatctattcatatgctctaaccttgagtacctatctattataataaacaagtatgttttataattattttgatcttgatatacttggatgatggcatatgcagcagctatatgtggatttttttagccctgccttcatacgctatttatttgcttggtactgtttcttttgtcgatgctcaccctgttgtttggtgttacttctgcaggtcgactttaacttagcctaggatccgcccatggtcgaacaggacggcctgcatgcaggatcaccagcggcctgggtcgaaagactcttcggctacgactgggcacaacagaccatcgggtgtagcgacgcagctgttttcaggctgtccgcacagggcagacccgttttgttcgtcaaaacagacctgtctggcgcgctcaacgaactgcaagacgaggccgcaagactgagctggcttgctaccacaggcgttccttgtgctgcagtcctcgacgtcgttactgaggctggaagagactggctgctcctgggtgaagtcccaggacaggaccttttgtccagccatctggcacctgccgaaaaggtcagcatcatggcagacgccatgagaaggctgcacacactcgaccctgcaacatgccccttcgatcaccaggcaaaacacaggatcgagcgcgcaagaacgcgcatggaggctggtttggtcgaccaagatgacctcgacgaggaacaccaaggactggctcctgctgaactcttcgccagactcaaggcgagaatgccagacggtgacgacctggtcgtcacacacggcgacgcttgtctcccaaacataatggtcgagaacggacgcttcagcggtttcatcgactgcggtagactcggagtcgctgacagataccaggacatcgccctggcaacacgcgacatcgcagaggaactcggaggcgaatgggctgacaggtttctcgtgctctacggtatcgctgctccagacagccagaggatcgcattctacaggctcctcgacgagttcttttagttcgaacggtacccggggatcctctagtgccgtgggtcgtttaagctgccgctgtacctgtgtcgtctggtgccttctggtgtacctgggaggttgtcgtctatcaagtatctgtggttggtgtcatgagtcagtgagtcccaatactgttcgtgtcctgtgtgcattatacccaaaactgttatgggcaaatcatgaataagcttgatgttcgaacttaaaagtctctgctcaatatggtattatggttgtttttgttcgtctcctaatatttgcctgggatcaaattttattggctggtgttcatttgacctccatgttcttgctaggctccattttttactctacagccataatatgtttgattgtttggtttgttctttgttgtacacctggttctgtcgagcttagttttcgacactggcttacagcttaacatgttgctattttattgggttctgattgctattttattgggttctgattgctagtttttgctgaatccaaaaaccatgttatttatttaagcgatccaggttattattatgatggtggctaagtttttttttttccaagggtaaattttctggattctccagtgtttctgtggccgaattcaatcactagagtcgacctgcaggatgaggagcaatcattgttcaagacatgatgcaaagctagaaaactttgattgtggccgtccttgtgaagtttaggccggggggaacttcatgaaccctatcgaagcttaattagttcttttttgttgttagccatgtttgtattgtagttaaggtgaacaacatgacgccgcacccgcgatctcagggctcgtccccacacaggagggcacgtcgtcgtcttcgccgccgagcatcagagattcagagcacatacacgcacatctcaagcaaacggagtagtacgtcctactcctacgtacatacctagccgacgacctttatgtgcacaccaccactgctctgctgcccggcctctccgtcgtccgttcatcaccaccggatccccacccagctttcttgtacaaagtggccgttaacggatcggccagaatggcccggaccgggttaccgaattcctgcccttaaggccaattgttcaagattcattcaacaattgaaacatctcccatgattaaatcagtataaggttgctatggtcttgcttgacaaagtttttttttgagggaatttcaactaaatttttgagtgaaactatcaaatactgattttaaaaaatttttataaaaggaagcgcagagataaaaggccatctatgctacaaaagtacccaaaaatgtaatcctaaagtatgaattgcattttttttttgtttggacgaaaggaaaggagtattaccacaagaatgatatcatcttcatatttagatcttttttgggtaaagcttgagattctctaaatatagagaaatcagaagaaaaaaaaaccgtgttttggtggttttgatttctagcctccacaataactttgacggcgtcgacaagtctaacggacaccaagcagcgaaccaccagcgccgagccaagcgaagcagacggccgagacgttgacaccttcggcgcggcatctctcgagagttccgctccggcgctccacctccaccgctggcggtttcttattccgttccgttccgcctcctgctctgctcctctccacaccacacggcacgaaaccgttacggcaccggcagcacccagcacgggagaggggattcctttcccaccgttccttccctttccgccccgccgctataaatagccagccccatccccagcttttttccccaatctcatctcctctctcctgttgttcggagcacacgcacaatccgatcgatccccaaatccccttcgtctctcctcgcgagcctcgtggatcccagcttcaaggtacggcgatcgatcatcccccctccttctctctaccttcttttctctagactacatcggatggcgatccatggttagggcctgctagtttcccttcctgttttgtcgatggctgcgaggcacaatagatctgatggcgttatgacggctaacttgtcatgttgttgcgatttatagtccctttaggagatcagtttaatttctcggatggttcgagatcggtggtccatggttagtaccctaagatccgcgctgttagggttcgtagatggaggcgacctgttctgattgttaacttgtcagtacctgggaaatcctgggatggttctagctcgtccgcagatgagatcgatttcatgatcctctgtatcttgtttcgttgcctaggttccgtctaatctatccgtggtatgatgtagatgttttgatcgtgctaactacgtcttgtaaagttaattgtcaggtcataatttttagcatgcctttttttttgtttggttttgtctaattgggctgtcgttctagatcagagtagaagactgttccaaactacctgctggatttattgaacttggatctgtatgtgtgtcacatatcttcataaattcatgattaagatggattgaaatatcttttatctttttggtatggatagttctatatgttggtgtggctttgttagatgtatacatgcttagatacatgaagcaacgtgctgctactgtttagtaattgctgttcatttgtctaataaacagataaggatatgtatttatgttgctgttggttttgctggtactttgttggatacaaatgcttcaatacagaaaacagcatgctgctacgatttaccatttatctaatcttatcatatgtctaatctaataaacaaacatgcttttaaattatcttcatatgcttggatgatggcatacacagcggctatgtgtggttttttaaatacccagcatcatgggcatgcatgacactgctttaatatgctttttatttgcttgagactgtttcttttgtttatactgaccctttagttcggtgactcttctgcaggtcgactttaacttagcctaggatccatggcccagtccaagcacggcctgaccaaggagatgaccatgaagtaccgcatggagggctgcgtggacggccacaagttcgtgatcaccggcgagggcatcggctaccccttcaagggcaagcaggccatcaacctgtgcgtggtggagggcggccccttgcccttcgccgaggacatcttgtccgccgccttcatgtacggcaaccgcgtgttcaccgagtacccccaggacatcgtcgactacttcaagaactcctgccccgccggctacacctgggaccgctccttcctgttcgaggacggcgccgtgtgcatctgcaacgccgacatcaccgtgagcgtggaggagaactgcatgtaccacgagtccaagttctacggcgtgaacttccccgccgacggccccgtgatgaagaagatgaccgacaactgggagccctcctgcgagaagatcatccccgtgcccaagcagggcatcttgaagggcgacgtgagcatgtacctgctgctgaaggacggtggccgcttgcgctgccagttcgacaccgtgtacaaggccaagtccgtgccccgcaagatgcccgactggcacttcatccagcacaagctgacccgcgaggaccgcagcgacgccaagaaccagaagtggcacctgaccgagcacgccatcgcctccggctccgccttgccctccggactcagatctcgatagggtaccaatggccagttaacagatccagctgctgctgttctagggttcacaagtctgcctatttgtcttccccaatggagctatggttgtctggtctggtccttggtcgtgtcccgtttcattgtgtactatttacctgtaatgtgtatccttaagtctggtttgatggtgtctgaaacgttttgctgtggtagagcagcatggaagaactataatgaataagtgatccctaatcattgtgtccaaattttgcttctgctatacccttttgtgctgtttcttatgttttgcttaaaaatttgatctgacaaacaaatttgtctaaattatgctcttgttctgactgtgtactgtacacatttgtattgctaccggtttggcacatagttttctctttgattgcagatcaaacccttctgattgcagattgcttggctatggctgatgtgctcactgttcttctttagcttgtatattgctgatggtggcttggctacggctgaaaaagttgctgctgcgccgacttggcaactgttgctccagtaatgctttgtcctctcttcctagccgccgacttggcacttggcagctgttgctcctgtaatgcgttgttatctcttatctcttgagatgtactatgattttgaggctgtttgacttgtgccagattgccagtgctgatgctatattatctcaggtttttatgctagtatatgttttactgtgtgctgcctgtgtcgagttacgtaatctattgaaccgctatgcgtgttgatgccctgttgttgcttgccagattgatgcccctgttgcttgcagcttgcaagctgtagtgaaatcctaaaattcgaaaccaaatctattctgaacttttgaagatctgtgatgtccggaagaaaagattcaaacagataaacgggactctccagaatctataaaataaatgatcgacaaacgctttgctttggtaggcttcctagttagttagcggaccgaagcttcggtccgggcctagaaggccagcttcggccgccccgggcaactttattatacaaagttgatagataaatcagatatctggttcctaaggacccggcggaccgattaaactgattcggtccgacgcgttacctaataacttcgtatagcatacattatacgaagttattagctaactaactagtaagcgtacacctgagctgattccgatgacttcgtaggttcctagctcaagccgctcgtgtccaagcgtcacttacgattagctaatgattacggcatctaggaccgactagctaactaactagtacgtacgcgccgactagctagctaaggtaccgagctcgaattcattccgattaatcgtggcctcttgctcttcaggatgaagagctatgtttaaacgtgcaagcgctactagacaattcagtacattaaaaacgtccgcaatgtgttattaagttgtctaagcgtcaatttgtttacaccacaatatatcctgccaccagccagccaacagctccccgaccggcagctcggcacaaaatcacctgtacaccgccagccaacagctccccgaccggcagctcggcacaaaatcaccactcgatacaggcagcccatcagtccgggacggcgtcagcgggagagccgttgtaaggcggcagactttgctcatgttaccgatgctattcggaagaacggcaactaagctgccgggtttgaaacacggatgatctcgcggagggtagcatgttgattgtaacgatgacagagcgttgctgcctgtgatcaaatatcatctccctcgcagagatccgaa

SEQ ID NO: 15 - DNA, 29992 bp, Artificial sequence
  Synthetic
gtttacccgccaatatatcctgtcaaacactgcggccgcacttgaccgcggatggagccggagctgtggtgaggccatcgacgggaggtgggggagaacacagtctcagtgttctttgtgagtccgcaaggtttttagcttttctgtattaattaaggttgctgttggctgtagaatacggtcgtggaagagctgtatcggtagctactacgtaagctattatatactggaagtctggagctcgtcgatctccggtcgtcttcctccatttctcctcgtcttgctttgactgctgctaccatttgcttctgttttctgatgaagcatgccatgtcggccaccagtgtttgtgtggtttttgcagggaatggctttcaagtgctgtgattgaatggccctcgtcgtcctcggctgagctcacatggacgcgtcatgtgagtgagatatatgatcatatgatgagtggggttcgggtgagtgcgtacttgaagtaggatcccgctttcactcattcattcattggcctttaaaccgggaaattttcgcgaggagatggagggaagcaagcagggtgacgagtgcagagtgccgcgagcgctttgtcaaaaggcaccgccgtaggcaaaaaaatcaatggccctgactgactcgatggtagtactactgtagagactagagagggttgctccccatatcttcgtgtgacttttactccagcattgcatttccgtcattgagacgttaattaatagcagctttcgggacagatgactgtggccatgtttcgtcacggccgcttcgtgccagctgggggtactatagtactgtgattttgttagtaaaaactttcattaggccaccattgacgaccgggccttcgcttttgctgcgctaattaaccatttcccggcgaccgaagggaacatgaacatgccccgacacatgagggcatgaggactagtgttctccctgtcgttcgttgacttgactagtgatagtttaaacgctcttcaactggaagagcggttactaccggttcactagctagctgctaatcgagctagttaccctatgaggtgacatgaagcgctcacggttactatgacggttagcttcacgactgttggtggcagtagcgtacgacttagctatagttccggacttacctagctaataacttcgtatagcatacattatacgaagttatggttaccgagctgttaccaagcggccgcacactgatagtttaaactgaaggcgggaaacgacaatctgatcatgagcggagaattaagggagtcacgttatgacccccgccgatgacgcgggacaagccgttttacgtttggaactgacagaaccgcaacgattgaaggagccactcagccgcgggtttctggagtttaatgagctaagcacatacgtcagaaaccattattgcgcgttcaaaagtcgcctaaggtcactatcagctagcaaatatttcttgtcaaaaatgctccactgacgttccataaattcccctcggtatccaattagagtctcatattcactcccatggcggccaatgcgggcggcggtggagcgggaggaggcagcggcagcggcagcgtggctgcgccggcggtgtgccgccccagcggctcgcggtggacgccgacgccggagcagatcaggatgctgaaggagctctactacggctgcggcatccggtcgcccagctcggagcagatccagcgcatcaccgccatgctgcggcagcacggcaagatcgagggcaagaacgtcttctactggttccagaaccacaaggcccgcgagcgccagaagcgccgcctcaccagcctcgacgtcaacgtgcccgccgccggcgcggccgacgccaccaccagccaactcggcgtcctctcgctgtcgtcgccgccgccttcaggcgcggcgcctccctcgcccaccctcggcttctacgccgccggcaatggcggcggatcggctgtgctgctggacacgagttccgactggggcagcagcggcgctgctatggccaccgagacatgcttcctgcaggactacatgggcgtgacggacacgggcagctcgtcgcagtggccacgcttctcgtcgtcggacacgataatggcggcggccgcggcgcgggcggcgacgacgcgggcgcccgagacgctccctctcttcccgacctgcggcgacgacggcggcagcggtagcagcagctacttgccgttctggggtgccgcgtccacaactgccggcgccacttcttccgttgcgatccaacagcaacaccagctgcaggagcagtacagcttttacagcaacagcaacagcacccagctggccggcaccggcaaccaagacgtatcggcaacagcagcagcagccgccgccctggagctgagcctcagctcatggtgctccccttaccctgctgcagggagtatgtgagagcaacgcgagctgccactgctcttcactgatgtctctggaatggaaggaggaggaagtgagaacagatcattcgacaaagcagcattagtccgttgatcggtggaagaccactcgtcagtgttgagttgaatgtttgatcaataaaatacggcaatgctgtaagggttgttttttatgccattgataatacactgtactgttcagttgttgaactctatttcttagccatgccaagtgcttttcttattttgaataacattacagcaaaaagttgaaagacaaaaaaaaaaacccccgaacagagtgctttgggtcccaagcttctttagactgtgttcggcgttccccctaaatttctccccctatatctcactcacttgtcacatcagcgttctctttccccctatatctccacgctctacagcagttccacctatatcaaacctctataccccaccacaacaatattatatactttcatcttcaactaactcatgtaccttccaatttttttctactaataattatttacgtgcacagaaacttagcaaggagagagagagcgggaatttaaatgctcggcgttaggcttttagtccgctaggtggctagaccgaggttaggacgctagttcactaggggcctagtggtgttttaagacgtcacggtcactacgaatcgaccgaagcttgcatgggccgcatcgagcagctggcttgtggggaccagacaaaaaaggaatggtgcagaattgttaggcgcacctaccaaaagcatctttgcctttattgcaaagataaagcagattcctctagtacaagtggggaacaaaataacgtggaaaagagctgtcctgacagcccactcactaatgcgtatgacgaacgcagtgacgaccacaaaactcgagcaacgagatcatgagccaatcaaagaggagtgatgtagacctaaagcaataatggagccatgacgtaagggcttacgcccatacgaaataattaaaggctgatgtgacctgtcggtctctcagaacctttactttttatgtttggcgtgtatttttaaatttccacggcaatgacgatgtgaccgtcgacccactaaaacattgctttgtcaaaagctaaaaaagatgatgcccgacagccacttgtgtgaagcatgagaagccggtccctccactaagaaaattagtgaagcatcttccagtggtccctccactcacagctcaatcagtgagcaacaggacgaaggaaatgacgtaagccatgacgtctaatcccagggccagcttgcatgcctgcagtgcagcgtgacccggtcgtgcccctctctagagataatgagcattgcatgtctaagttataaaaaattaccacatattttttttgtcacacttgtttgaagtgcagtttatctatctttatacatatatttaaactttactctacgaataatataatctatagtactacaataatatcagtgttttagagaatcatataaatgaacagttagacatggtctaaaggacaattgagtattttgacaacaggactctacagttttatctttttagtgtgcatgtgttctcctttttttttgcaaatagcttcacctatataatacttcatccattttattagtacatccatttagggtttagggttaatggtttttatagactaatttttttagtacatctattttattctattttagcctctaaattaagaaaactaaaactctattttagtttttttatttaataatttagatataaaatagaataaaataaagtgactaaaaattaaacaaataccctttaagaaattaaaaaaactaaggaaacatttttcttgtttcgagtagataatgccagcctgttaaacgccgtcgacgagtctaacggacaccaaccagcgaaccagcagcgtcgcgtcgggccaagcgaagcagacggcacggcatctctgtcgctgcctctggacccctctcgagagttccgctccaccgttggacttgctccgctgtcggcatccagaaattgcgtggcggagcggcagacgtgagccggcacggcaggcggcctcctcctcctctcacggcaccggcagctacgggggattcctttcccaccgctccttcgctttcccttcctcgcccgccgtaataaatagacaccccctccacaccctctttccccaacctcgtgttgttcggagcgcacacacacacaaccagatctcccccaaatccacccgtcggcacctccgcttcaaggtacgccgctcgtcctcccccccccccctctctaccttctctagatcggcgttccggtccatgcatggttagggcccggtagttctacttctgttcatgtttgtgttagatccgtgtttgtgttagatccgtgctgctagcgttcgtacacggatgcgacctgtacgtcagacacgttctgattgctaacttgccagtgtttctctttggggaatcctgggatggctctagccgttccgcagacgggatcgatttcatgattttttttgtttcgttgcatagggtttggtttgcccttttcctttatttcaatatatgccgtgcacttgtttgtcgggtcatcttttcatgcttttttttgtcttggttgtgatgatgtggtctggttgggcggtcgttctagatcggagtagaattctgtttcaaactacctggtggatttattaattttggatctgtatgtgtgtgccatacatattcatagttacgaattgaagatgatggatggaaatatcgatctaggataggtatacatgttgatgcgggttttactgatgcatatacagagatgctttttgttcgcttggttgtgatgatgtggtgtggttgggcggtcgttcattcgttctagatcggagtagaatactgtttcaaactacctggtgtatttattaattttggaactgtatgtgtgtgtcatacatcttcatagttacgagtttaagatggatggaaatatcgatctaggataggtatacatgttgatgtgggttttactgatgcatatacatgatggcatatgcagcatctattcatatgctctaaccttgagtacctatctattataataaacaagtatgttttataattattttgatcttgatatacttggatgatggcatatgcagcagctatatgtggatttttttagccctgccttcatacgctatttatttgcttggtactgtttcttttgtcgatgctcaccctgttgtttggtgttacttctgcaggtcgactttaacttagcctaggatccatggccactgtgaacaactggctcgctttctccctctccccgcaggagctgccgccctcccagacgacggactccacactcatctcggccgccaccgccgaccatgtctccggcgatgtctgcttcaacatcccccaagattggagcatgaggggatcagagctttcggcgctcgtcgcggagccgaagctggaggacttcctcggcggcatctccttctccgagcagcatcacaaggccaactgcaacatgatacccagcactagcagcacagtttgctacgcgagctcaggtgctagcaccggctaccatcaccagctgtaccaccagcccaccagctcagcgctccacttcgcggactccgtaatggtggcttcctcggccggtgtccacgacggcggtgccatgctcagcgcggccgccgctaacggtgtcgctggcgctgccagtgccaacggcggcggcatcgggctgtccatgattaagaactggctgcggagccaaccggcgcccatgcagccgagggtggcggcggctgagggcgcgcaggggctctctttgtccatgaacatggcggggacgacccaaggcgctgctggcatgccacttctcgctggagagcgcgcacgggcgcccgagagtgtatcgacgtcagcacagggtggagccgtcgtcgtcacggcgccgaaggaggatagcggtggcagcggtgttgccggcgctctagtagccgtgagcacggacacgggtggcagcggcggcgcgtcggctgacaacacggcaaggaagacggtggacacgttcgggcagcgcacgtcgatttaccgtggcgtgacaaggcatagatggactgggagatatgaggcacatctttgggataacagttgcagaagggaagggcaaactcgtaagggtcgtcaagtctatttaggtggctatgataaagaggagaaagctgctagggcttatgatcttgctgctctgaagtactggggtgccacaacaacaacaaattttccagtgagtaactacgaaaaggagctcgaggacatgaagcacatgacaaggcaggagtttgtagcgtctctgagaaggaagagcagtggtttctccagaggtgcatccatttacaggggagtgactaggcatcaccaacatggaagatggcaagcacggattggacgagttgcagggaacaaggatctttacttgggcaccttcagcacccaggaggaggcagcggaggcgtacgacatcgcggcgatcaagttccgcggcctcaacgccgtcaccaacttcgacatgagccgctacgacgtgaagagcatcctggacagcagcgccctccccatcggcagcgccgccaagcgcctcaaggaggccgaggccgcagcgtccgcgcagcaccaccacgccggcgtggtgagctacgacgtcggccgcatcgcctcgcagctcggcgacggcggagccctggcggcggcgtacggcgcgcactaccacggcgccgcctggccgaccatcgcgttccagccgggcgccgccagcacaggcctgtaccacccgtacgcgcagcagccaatgcgcggcggcgggtggtgcaagcaggagcaggaccacgcggtgatcgcggccgcgcacagcctgcaggacctccaccacctgaacctgggcgcggccggcgcgcacgactttttctcggcagggcagcaggccgccgccgctgcgatgcacggcctgggtagcatcgacagtgcgtcgctcgagcacagcaccggctccaactccgtcgtctacaacggcggggtcggcgacagcaacggcgccagcgccgtcggcggcagtggcggtggctacatgatgccgatgagcgctgccggagcaaccactacatcggcaatggtgagccacgagcaggtgcatgcacgggcctacgacgaagccaagcaggctgctcagatggggtacgagagctacctggtgaacgcggagaacaatggtggcggaaggatgtctgcatgggggactgtcgtgtctgcagccgcggcggcagcagcaagcagcaacgacaacatggccgccgacgtcgggcatggcggcgcgcagctcttcagtgtctggaacgacacttaagcgtacctagtggtacctgacatcttatagtctgcaacctctcgtgtctgaattcctatctttatcaagtgttattgcttccacgactataggacagctttcgtcgaaagcttttgctcatgtgatctcgaaggattcatctagtctgatttttcgtgacttgtatcggttttattggattcatccaacatatatcaataaaaaatgagttgtgtttcctttcttcctagttcagttaaaattatttccctcctgcgcttgtgctgtaattgtctgtgtacctgttgtttgtgactgtgttagttcccttggatatgatttcgtatttgatatgtacatggagatagcttagcttcattattggagtatgaagttagtatgacatagtcactctcctggaaaattgacactgcaaaccatatttttattctgaaccacaaatcctagtcagtccgctggcatatgccgtccgtttgctgaatccagaacgtgggtttggagatgtacggctgagatgcctctatgcgaaggggatttcgtggtgaaacgagatgggagtagagcaacgcccgtggaagatgcttcaaacttccacacttttgagcaacgatcggcagtagtaaggtagacgatttcaagatcaaagcatatgaagataaacaacatcaacaacaaaatttgttggggttctatagagagaaacagagctacatacatacactgttttgtatctaccatctgagatgatgaaaagatgaaaaactaaagaatgccccggcgccaacgccaggacacgccgcgcgcgcgtcacccgagccatctcttgacccagccggcgctgtatatttacacacgttgcagcatcgatcaccacctgttcgatcgcgtcgccgtcaccggcgcgccgcgacttattgaactagtctagggcgcggctaacaacctagcttagattgccttgtctaaacccttaggctaacgcgccactctagacaccttgctagttggatattacctcttctcttcaaagtatccttgaacgctcaccggttatcaaatctctacactatagctctgtagtcttgctagatagttagttctttagctctcgaattcgagctcggtaccctggttcacaaactcaatacaacacacagtggagtagggtattacgctccggcggcccgaaccactctaaatccttgtgtcctcgtgtgctcttccaccattaatgactgtaattgcagggacacgaagagttgtagcgcttttgccaacaagatccgctatatgctagtagagtggaacctgcacagcaacaagcatccaataatctgagaataagaattatgtgtggtgatggttctcatctctgcaactcgccattttcgcgagagaaccaaatccaagttggtgaagatcatgatttgggctcatgggctggcatagtagctattacctttgcaattgtggttcgaatctatccgatattctccttttcagggagagctaatgcttatgcttattgggtattttggtttgacactgcttcacgcccaaaaaaaggcaactatgtctgagttggatatggcccaaaaaaaggcagctatgtctgagttggatatggaagtcttctttcgtttagggtgaagtaagaccaagctcatgagcttattatcttaggtcggaacaaattagttgataggcatggcacatttatcaaattataatgattttaacagaaaagcaacacctctttttcagcagcaccagctttgcaagctgcaattgacactccaagcatagtatttgctccaaactcagcctgcatttcgcacaatatcatatctatttccatttggataaaatatattttccagaaatatgggaacagaatcaagatacagaaaaaagttgtggtagtagtggtaagtggaaacacaagtacagtgaaaagatagcattatttctgaacagtcaaattaaccgaaataagtagtatcacatactgcccctaaattgactacacccaatgtaaagaattgcttgagcatattgagccatcagttgtttgtttgtgtaacggatttgacaatgcagagttcaggagcaaaaaaccgcaaaggagagaaagagggaaaggatctcctagtatcccaccttgtggcgcgccctgtcaagtgcatgatggcctggtcgatctgcgtctgctgctgcggttccatcccaacgagtgcctccgacaccttgtcgttgatcacccgcaccgcgtaggcgacccccctggcgaggaacttccgcctctcggaggccccggccgcgtcggcggcggcgccctcgagcgcgcccacgctagccgtagatgctcggtgcacggccttgttggtgtgcaactcgacctcaacggccggtgcgctacgcccgtcaaggatctggcgcgcccgcaccctcgtgatcacggtgggcgcctcccgcctcatgtggccgacgatgaaaagcgccgggttaggggccttggcgcgcaccgccgtattcagggcctcctcgctcttgcgcgagagcaggtgcttccccaggtactcctgcactgacaaggctgccacagcggtggaatttgtcctcacgacttcgccacgtcgtcctcacctccctggcttcccacgactccgccgtatcgaggtgctcggtgggtcgtcttaatccgaagtccgaactaggaagacgagacagagaggtctgaggaatgggcctcgtttgatgttgagctgaattatttttccagcataagcccaggtcttggtccatgaacaaaattactagaaacccagcccagtactacgatctaaaagagggactgccactggatagctctctctagcattctccacgctccaatacagcggcgtcgtgtctatccgggtctatccgcgaacacgtgagaactctccagaaactgctttctcctccacttcatctctctcgctttccctctataaaaagaccccttctaggaattgagggagacagcaagcaccaagcagcgatccgaagctcaatcaattcactcaaacctcttccccaaatcttcgattagatcttcgttgacaagaagactagaaccgaacctgacatgtccaacctgctcacggttcaccagaaccttccggctcttccagtggacgcgacgtccgatgaagtcaggaagaacctcatggacatgttccgcgacaggcaagcgttcagcgagcacacctggaagatgctgctctccgtctgccgctcctgggctgcatggtgcaagctgaacaacaggaagtggttccccgctgagcccgaggacgtgagggattaccttctgtacctgcaagcgcgaggtttgtttctgcttctacctttgatatatatataataattatcattaattagtagtaatataatatttcaaatatttttttcaaaataaaagaatgtagtatatagcaattgcttttctgtagtttataagtgtgtatattttaatttataacttttctaatatatgaccaaaacatggtgatgcctaggtctggcagtgaagaccatccagcaacaccttggacaactgaacatgcttcacaggcgctccggcctcccgcgccccagcgactcgaacgccgtgagcctcgtcatgcgccgcatcaggaaggaaaacgtcgatgccggcgaaagggcaaagcaggccctcgcgttcgagaggaccgatttcgaccaggtccgcagcctgatggagaacagcgacaggtgccaggacattaggaacctggcgttcctcggaattgcatacaacacgctcctcaggatcgcggaaattgcccgcattcgcgtgaaggacattagccgcaccgacggcggcaggatgcttatccacattggcaggaccaagacgctcgtttccaccgcaggcgtcgaaaaggccctcagcctcggagtgaccaagctcgtcgaacgctggatctccgtgtccggcgtcgcggacgacccaaacaactacctcttctgccgcgtccgcaagaacggggtggctgcccctagcgccaccagccaactcagcacgagggccttggaaggtattttcgaggccacccaccgcctgatctacggcgcgaaggatgacagcggtcaacgctacctcgcatggtccgggcactccgcccgcgttggagctgctagggacatggcccgcgccggtgtttccatccccgaaatcatgcaggcgggtggatggacgaacgtgaacattgtcatgaactacattcgcaaccttgacagcgagacgggcgcaatggttcgcctcctggaagatggtgactgaggtacccaacctagacttgtccatcttctggattggccaacttaattaatgtatgaaataaaaggatgcacacatagtgacatgctaatcactataatgtgggcatcaaagttgtgtgttatgtgtaattactagttatctgaataaaagagaaagagatcatccatatttcttatcctaaatgaatgtcacgtgtctttataattctttgatgaaccagatgcatttcattaaccaaatccatatacatataaatattaatcatatataattaatatcaattgggttagcaaaacaaatctagtctaggtgtgttttgcgatccgatatcaggcctgacgtctaaaaacggcccctaactaacgcttagttgcccgctagattagtcccccgttagtgcctagttagacacacgacgaactaggggctagccaccttgctagttggatattacctcttctcttcaaagtatccttgaacgctcaccggttatcaaatctctacactatagctctgtagtcttgctagatagttagttctttagctctcgtgcgcacgataacttcgtatagcatacattatacgaagttataacagcggaccgggttaccgaattcctgcccaactttgtatagaaaagttgggccgaattcgagctcggtacggccagaatggcccggaccgaagcttgcatgcctgcagtgcagcgtgacccggtcgtgcccctctctagagataatgagcattgcatgtctaagttataaaaaattaccacatattttttttgtcacacttgtttgaagtgcagtttatctatctttatacatatatttaaactttactctacgaataatataatctatagtactacaataatatcagtgttttagagaatcatataaatgaacagttagacatggtctaaaggacaattgagtattttgacaacaggactctacagttttatctttttagtgtgcatgtgttctcctttttttttgcaaatagcttcacctatataatacttcatccattttattagtacatccatttagggtttagggttaatggtttttatagactaatttttttagtacatctattttattctattttagcctctaaattaagaaaactaaaactctattttagtttttttatttaataatttagatataaaatagaataaaataaagtgactaaaaattaaacaaataccctttaagaaattaaaaaaactaaggaaacatttttcttgtttcgagtagataatgccagcctgttaaacgccgtcgacgagtctaacggacaccaaccagcgaaccagcagcgtcgcgtcgggccaagcgaagcagacggcacggcatctctgtcgctgcctctggacccctctcgagagttccgctccaccgttggacttgctccgctgtcggcatccagaaattgcgtggcggagcggcagacgtgagccggcacggcaggcggcctcctcctcctctcacggcaccggcagctacgggggattcctttcccaccgctccttcgctttcccttcctcgcccgccgtaataaatagacaccccctccacaccctctttccccaacctcgtgttgttcggagcgcacacacacacaaccagatctcccccaaatccacccgtcggcacctccgcttcaaggtacgccgctcgtcctcccccccccccctctctaccttctctagatcggcgttccggtccatgcatggttagggcccggtagttctacttctgttcatgtttgtgttagatccgtgtttgtgttagatccgtgctgctagcgttcgtacacggatgcgacctgtacgtcagacacgttctgattgctaacttgccagtgtttctctttggggaatcctgggatggctctagccgttccgcagacgggatcgatttcatgattttttttgtttcgttgcatagggtttggtttgcccttttcctttatttcaatatatgccgtgcacttgtttgtcgggtcatcttttcatgcttttttttgtcttggttgtgatgatgtggtctggttgggcggtcgttctagatcggagtagaattctgtttcaaactacctggtggatttattaattttggatctgtatgtgtgtgccatacatattcatagttacgaattgaagatgatggatggaaatatcgatctaggataggtatacatgttgatgcgggttttactgatgcatatacagagatgctttttgttcgcttggttgtgatgatgtggtgtggttgggcggtcgttcattcgttctagatcggagtagaatactgtttcaaactacctggtgtatttattaattttggaactgtatgtgtgtgtcatacatcttcatagttacgagtttaagatggatggaaatatcgatctaggataggtatacatgttgatgtgggttttactgatgcatatacatgatggcatatgcagcatctattcatatgctctaaccttgagtacctatctattataataaacaagtatgttttataattattttgatcttgatatacttggatgatggcatatgcagcagctatatgtggatttttttagccctgccttcatacgctatttatttgcttggtactgtttcttttgtcgatgctcaccctgttgtttggtgttacttctgcaggtcgactttaacttagcctaggatccatggcaccgaagaagaagcgcaaggtgatggacaagaagtacagcatcggcctcgacatcggcaccaactcggtgggctgggccgtcatcacggacgaatataaggtcccgtcgaagaagttcaaggtcctcggcaatacagaccgccacagcatcaagaaaaacttgatcggcgccctcctgttcgatagcggcgagaccgcggaggcgaccaggctcaagaggaccgccaggagacggtacactaggcgcaagaacaggatctgctacctgcaggagatcttcagcaacgagatggcgaaggtggacgactccttcttccaccgcctggaggaatcattcctggtggaggaggacaagaagcatgagcggcacccaatcttcggcaacatcgtcgacgaggtaagtttctgcttctacctttgatatatatataataattatcattaattagtagtaatataatatttcaaatatttttttcaaaataaaagaatgtagtatatagcaattgcttttctgtagtttataagtgtgtatattttaatttataacttttctaatatatgaccaaaacatggtgatgtgcaggtggcctaccacgagaagtacccgacaatctaccacctccggaagaaactggtggacagcacagacaaggcggacctccggctcatctaccttgccctcgcgcatatgatcaagttccgcggccacttcctcatcgagggcgacctgaacccggacaactccgacgtggacaagctgttcatccagctcgtgcagacgtacaatcaactgttcgaggagaaccccataaacgctagcggcgtggacgccaaggccatcctctcggccaggctctcgaaatcaagaaggctggagaaccttatcgcgcagttgccaggcgaaaagaagaacggcctcttcggcaaccttattgcgctcagcctcggcctgacgccgaacttcaaatcaaacttcgacctcgcggaggacgccaagctccagctctcaaaggacacctacgacgacgacctcgacaacctcctggcccagataggagaccagtacgcggacctcttcctcgccgccaagaacctctccgacgctatcctgctcagcgacatccttcgggtcaacaccgaaattaccaaggcaccgctgtccgccagcatgattaaacgctacgacgagcaccatcaggacctcacgctgctcaaggcactcgtccgccagcagctccccgagaagtacaaggagatcttcttcgaccaatcaaaaaacggctacgcgggatatatcgacggcggtgccagccaggaagagttctacaagttcatcaaaccaatcctggagaagatggacggcaccgaggagttgctggtcaagctcaacagggaggacctcctcaggaagcagaggaccttcgacaacggctccatcccgcatcagatccacctgggcgaactgcatgccatcctgcggcgccaggaggacttctacccgttcctgaaggataaccgggagaagatcgagaagatcttgacgttccgcatcccatactacgtgggcccgctggctcgcggcaactcccggttcgcctggatgacccggaagtcggaggagaccatcacaccctggaactttgaggaggtggtcgataagggcgctagcgctcagagcttcatcgagcgcatgaccaacttcgataaaaacctgcccaatgaaaaagtcctccccaagcactcgctgctctacgagtacttcaccgtgtacaacgagctcaccaaggtcaaatacgtcaccgagggcatgcggaagccggcgttcctgagcggcgagcagaagaaggcgatagtggacctcctcttcaagaccaacaggaaggtgaccgtgaagcaattaaaagaggactacttcaagaaaatagagtgcttcgactccgtggagatctcgggcgtggaggatcggttcaacgcctcactcggcacgtatcacgacctcctcaagatcattaaagacaaggacttcctcgacaacgaggagaacgaggacatcctcgaggacatcgtcctcaccctgaccctgttcgaggaccgcgaaatgatcgaggagaggctgaagacctacgcgcacctgttcgacgacaaggtcatgaaacagctcaagaggcgccgctacactggttggggaaggctgtcccgcaagctcattaatggcatcagggacaagcagagcggcaagaccatcctggacttcctcaagtccgacgggttcgccaaccgcaacttcatgcagctcattcacgacgactcgctcacgttcaaggaagacatccagaaggcacaggtgagcgggcagggtgactccctccacgaacacatcgccaacctggccggctcgccggccattaaaaagggcatcctgcagacggtcaaggtcgtcgacgagctcgtgaaggtgatgggccggcacaagcccgaaaatatcgtcatagagatggccagggagaaccagaccacccaaaaagggcagaagaactcgcgcgagcggatgaaacggatcgaggagggcattaaagagctcgggtcccagatcctgaaggagcaccccgtggaaaatacccagctccagaatgaaaagctctacctctactacctgcagaacggccgcgacatgtacgtggaccaggagctggacattaatcggctatcggactacgacgtcgaccacatcgtgccgcagtcgttcctcaaggacgatagcatcgacaacaaggtgctcacccggtcggataaaaatcggggcaagagcgacaacgtgcccagcgaggaggtcgtgaagaagatgaaaaactactggcgccagctcctcaacgcgaaactgatcacccagcgcaagttcgacaacctgacgaaggcggaacgcggtggcttgagcgaactcgataaggcgggcttcataaaaaggcagctggtcgagacgcgccagatcacgaagcatgtcgcccagatcctggacagccgcatgaatactaagtacgatgaaaacgacaagctgatccgggaggtgaaggtgatcacgctgaagtccaagctcgtgtcggacttccgcaaggacttccagttctacaaggtccgcgagatcaacaactaccaccacgcccacgacgcctacctgaatgcggtggtcgggaccgccctgatcaagaagtacccgaagctggagtcggagttcgtgtacggcgactacaaggtctacgacgtgcgcaaaatgatcgccaagtccgagcaggagatcggcaaggccacggcaaaatacttcttctactcgaacatcatgaacttcttcaagaccgagatcaccctcgcgaacggcgagatccgcaagcgcccgctcatcgaaaccaacggcgagacgggcgagatcgtctgggataagggccgggatttcgcgacggtccgcaaggtgctctccatgccgcaagtcaatatcgtgaaaaagacggaggtccagacgggcgggttcagcaaggagtccatcctcccgaagcgcaactccgacaagctcatcgcgaggaagaaggattgggacccgaaaaaatatggcggcttcgacagcccgaccgtcgcatacagcgtcctcgtcgtggcgaaggtggagaagggcaagtcaaagaagctcaagtccgtgaaggagctgctcgggatcacgattatggagcggtcctccttcgagaagaacccgatcgacttcctagaggccaagggatataaggaggtcaagaaggacctgattattaaactgccgaagtactcgctcttcgagctggaaaacggccgcaagaggatgctcgcctccgcaggcgagttgcagaagggcaacgagctcgccctcccgagcaaatacgtcaatttcctgtacctcgctagccactatgaaaagctcaagggcagcccggaggacaacgagcagaagcagctcttcgtggagcagcacaagcattacctggacgagatcatcgagcagatcagcgagttctcgaagcgggtgatcctcgccgacgcgaacctggacaaggtgctgtcggcatataacaagcaccgcgacaaaccaatacgcgagcaggccgaaaatatcatccacctcttcaccctcaccaacctcggcgctccggcagccttcaagtacttcgacaccacgattgaccggaagcggtacacgagcacgaaggaggtgctcgatgcgacgctgatccaccagagcatcacagggctctatgaaacacgcatcgacctgagccagctgggcggagacaagagaccacgggaccgccacgatggcgagctgggaggccgcaagcgggcaaggtaggtaccgttaacctagacttgtccatcttctggattggccaacttaattaatgtatgaaataaaaggatgcacacatagtgacatgctaatcactataatgtgggcatcaaagttgtgtgttatgtgtaattactagttatctgaataaaagagaaagagatcatccatatttcttatcctaaatgaatgtcacgtgtctttataattctttgatgaaccagatgcatttcattaaccaaatccatatacatataaatattaatcatatataattaatatcaattgggttagcaaaacaaatctagtctaggtgtgttttgccccgggttaacggcaaacgctaattagtcactaggcccaggaaacactaactaagccctagcttatcctagcgcaacctagttaggtcttccccaagtttgtacaaaaaagcaggctccggccagaatggcccggaccgggttgcggccgcgaattcctgcagggccctcttgtcggaccagttgcccaccacgttggtgagctccagcttttgttccctttagtgagggttaattaccgaattcgagctcggtaccctgggatccgatatcgatgggccctggccgaagcttgcggccgcgaattcctgcagggccctcttgtcggaccagttgcccaccacgttggtgaggggcaactttattatacaaagttgagctaactaactaggttaactcacttaagatgtactcgacaatggtgccctcataccggcatgtgtttcctagaaataatcaatatattgattgagatttatctcgatatatttctgaactatgttcatcatataaataactgaaaacatcaaatcgtaattttaaactcatgcttggtcaatacatagataatacaatattacttcatcatcccaatgatgtcctagcacaacctattgaatgttaatgtttggttgtgtgggggtgtgtttataacatagatgtgattatttgtgctttttgttgagtatatacatatatggtatgttgatttgatatagtgatggacacatgctttggccttggatattcaaatcacttgtacttgcacgaagcaaaacataatataagtttagaagtaaacttgtaactgtgtccaaacatgctcacacaaagtcatatcgcattatatttttttggtaaatattcaacacatgtattttttacaagaacccaaattttacagacaaatgcagcattgtagacatgtagaattctttgaagcatgtgaacttaacaacactaatgtcattaaatcaactggaccctatgagtaacaatttcgatattgcaaacaccaaattatggaacttatttgctgaaaaaattatgatcaatgtgaagtttaaattattataccataaatatatcaaagattttttttgaggaaggtaaaaattgcatggaatgggctgcccaacgtgatagctcacttttatgctaggtagcattaccaaagatgggaatgttctgatgaacaccaaacccactcaaataatatttatatttgggttgtttagttgtaaaagtgaagacccaagattaaagtaccaattgtcgatgccatacactagaagtgaagaatgttgttagcgttaggagtagatgtgtcaatggggaccgatactcgttatcgatgggccgcacgtaagcttgcatgcctgcagtgcagcgtgacccggtcgtgcccctctctagagataatgagcattgcatgtctaagttataaaaaattaccacatattttttttgtcacacttgtttgaagtgcagtttatctatctttatacatatatttaaactttactctacgaataatataatctatagtactacaataatatcagtgttttagagaatcatataaatgaacagttagacatggtctaaaggacaattgagtattttgacaacaggactctacagttttatctttttagtgtgcatgtgttctcctttttttttgcaaatagcttcacctatataatacttcatccattttattagtacatccatttagggtttagggttaatggtttttatagactaatttttttagtacatctattttattctattttagcctctaaattaagaaaactaaaactctattttagtttttttatttaataatttagatataaaatagaataaaataaagtgactaaaaattaaacaaataccctttaagaaattaaaaaaactaaggaaacatttttcttgtttcgagtagataatgccagcctgttaaacgccgtcgacgagtctaacggacaccaaccagcgaaccagcagcgtcgcgtcgggccaagcgaagcagacggcacggcatctctgtcgctgcctctggacccctctcgagagttccgctccaccgttggacttgctccgctgtcggcatccagaaattgcgtggcggagcggcagacgtgagccggcacggcaggcggcctcctcctcctctcacggcaccggcagctacgggggattcctttcccaccgctccttcgctttcccttcctcgcccgccgtaataaatagacaccccctccacaccctctttccccaacctcgtgttgttcggagcgcacacacacacaaccagatctcccccaaatccacccgtcggcacctccgcttcaaggtacgccgctcgtcctcccccccccccctctctaccttctctagatcggcgttccggtccatgcatggttagggcccggtagttctacttctgttcatgtttgtgttagatccgtgtttgtgttagatccgtgctgctagcgttcgtacacggatgcgacctgtacgtcagacacgttctgattgctaacttgccagtgtttctctttggggaatcctgggatggctctagccgttccgcagacgggatcgatttcatgattttttttgtttcgttgcatagggtttggtttgcccttttcctttatttcaatatatgccgtgcacttgtttgtcgggtcatcttttcatgcttttttttgtcttggttgtgatgatgtggtctggttgggcggtcgttctagatcggagtagaattctgtttcaaactacctggtggatttattaattttggatctgtatgtgtgtgccatacatattcatagttacgaattgaagatgatggatggaaatatcgatctaggataggtatacatgttgatgcgggttttactgatgcatatacagagatgctttttgttcgcttggttgtgatgatgtggtgtggttgggcggtcgttcattcgttctagatcggagtagaatactgtttcaaactacctggtgtatttattaattttggaactgtatgtgtgtgtcatacatcttcatagttacgagtttaagatggatggaaatatcgatctaggataggtatacatgttgatgtgggttttactgatgcatatacatgatggcatatgcagcatctattcatatgctctaaccttgagtacctatctattataataaacaagtatgttttataattattttgatcttgatatacttggatgatggcatatgcagcagctatatgtggatttttttagccctgccttcatacgctatttatttgcttggtactgtttcttttgtcgatgctcaccctgttgtttggtgttacttctgcaggtcgactctagaggatccaccatggttgaacaagatggattgcacgcaggttctccggccgcttgggtggagaggctattcggctatgactgggcacaacagacaatcggctgctctgatgccgccgtgttccggctgtcagcgcaggggcgcccggttctttttgtcaagaccgacctgtccggtgccctgaatgaactgcaggacgaggcagcgcggctatcgtggctggccacgacgggcgttccttgcgcagctgtgctcgacgttgtcactgaagcgggaagggactggctgctattgggcgaagtgccggggcaggatctcctgtcatctcaccttgctcctgccgagaaagtatccatcatggctgatgcaatgcggcggctgcatacgcttgatccggctacctgcccattcgaccaccaagcgaaacatcgcatcgagcgagcacgtactcggatggaagccggtcttgtcgatcaggatgatctggacgaagagcatcaggggctcgcgccagccgaactgttcgccaggctcaaggcgcgcatgcccgacggcgatgatctcgtcgtgacccatggcgatgcctgcttgccgaatatcatggtggaaaatggccgcttttctggattcatcgactgtggccggctgggtgtggcggaccgctatcaggacatagcgttggctacccgtgatattgctgaagagcttggcggcgaatgggctgaccgcttcctcgtgctttacggtatcgccgctcccgattcgcagcgcatcgccttctatcgccttcttgacgagttcttctgaggatccaccatggttaacctagacttgtccatcttctggattggccaacttaattaatgtatgaaataaaaggatgcacacatagtgacatgctaatcactataatgtgggcatcaaagttgtgtgttatgtgtaattactagttatctgaataaaagagaaagagatcatccatatttcttatcctaaatgaatgtcacgtgtctttataattctttgatgaaccagatgcatttcattaaccaaatccatatacatataaatattaatcatatataattaatatcaattgggttagcaaaacaaatctagtctaggtgtgttttgcgaatgcgaccttcttatgtgcttctagtctccaaatgtggttgatagttattttgctctaagatcaacagtaatgaagtataaatcatcgttgtggtgtgctactcggttaattgagcattaacacacacaaacatgacgaggatggtataatctccaaaaatgtgtactttgttaggtgggaccctatagccttgattaatgtgctatgttaggcatgcctggaaacgtgtgacgcatatgttttgtgaacctgttgatattatatgtgcttttatattaccatattttattaaaatactaatatttattactagtaagatataacattctatctagcttaaaaactaaccataaatattccataataactagatttaccaaactaatatactaaatatacataataaatacaaaattaacaagacaataatcaatatttatgagcttaatatatttagacattatggttggtcgacgataatcatgctaacttttcgtaattgcttgattgaaatatgcttagaataatgcctctttgttctacatggcaaatagggaccattatggtgtaacaccctgggaaccacaaacaccccgaaatgctactaaactacacaactaaccttcatatataaaatttcgacagcatctcctttgaaaatttgcatagacgtggaagcaacagagtataaacagatatcatgataagaaaacatactagacattaataatctgctagaaatgggaagaatcctaacttgacgactgcgtaactgactagagtcacacttagctgaccctagtcacttactgcccttaaggccaattgttcaagattcattcaacaattgaaacatctcccatgattaaatcagtataaggttgctatggtcttgcttgacaaagtttttttttgagggaatttcaactaaatttttgagtgaaactatcaaatactgattttaaaaaatttttataaaaggaagcgcagagataaaaggccatctatgctacaaaagtacccaaaaatgtaatcctaaagtatgaattgcattttttttttgtttggacgaaaggaaaggagtattaccacaagaatgatatcatcttcatatttagatcttttttgggtaaagcttgagattctctaaatatagagaaatcagaagaaaaaaaaaccgtgttttggtggttttgatttctagcctccacaataactttgacggcgtcgacaagtctaacggacaccaagcagcgaaccaccagcgccgagccaagcgaagcagacggccgagacgttgacaccttcggcgcggcatctctcgagagttccgctccggcgctccacctccaccgctggcggtttcttattccgttccgttccgcctcctgctctgctcctctccacaccacacggcacgaaaccgttacggcaccggcagcacccagcacgggagaggggattcctttcccaccgttccttccctttccgccccgccgctataaatagccagccccatccccagcttttttccccaatctcatctcctctctcctgttgttcggagcacacgcacaatccgatcgatccccaaatccccttcgtctctcctcgcgagcctcgtggatcccagcttcaaggtacggcgatcgatcatcccccctccttctctctaccttcttttctctagactacatcggatggcgatccatggttagggcctgctagtttcccttcctgttttgtcgatggctgcgaggcacaatagatctgatggcgttatgacggctaacttgtcatgttgttgcgatttatagtccctttaggagatcagtttaatttctcggatggttcgagatcggtggtccatggttagtaccctaagatccgcgctgttagggttcgtagatggaggcgacctgttctgattgttaacttgtcagtacctgggaaatcctgggatggttctagctcgtccgcagatgagatcgatttcatgatcctctgtatcttgtttcgttgcctaggttccgtctaatctatccgtggtatgatgtagatgttttgatcgtgctaactacgtcttgtaaagttaattgtcaggtcataatttttagcatgcctttttttttgtttggttttgtctaattgggctgtcgttctagatcagagtagaagactgttccaaactacctgctggatttattgaacttggatctgtatgtgtgtcacatatcttcataaattcatgattaagatggattgaaatatcttttatctttttggtatggatagttctatatgttggtgtggctttgttagatgtatacatgcttagatacatgaagcaacgtgctgctactgtttagtaattgctgttcatttgtctaataaacagataaggatatgtatttatgttgctgttggttttgctggtactttgttggatacaaatgcttcaatacagaaaacagcatgctgctacgatttaccatttatctaatcttatcatatgtctaatctaataaacaaacatgcttttaaattatcttcatatgcttggatgatggcatacacagcggctatgtgtggttttttaaatacccagcatcatgggcatgcatgacactgctttaatatgctttttatttgcttgagactgtttcttttgtttatactgaccctttagttcggtgactcttctgcaggtcgactttaacttagcctaggatccatggcccagtccaagcacggcctgaccaaggagatgaccatgaagtaccgcatggagggctgcgtggacggccacaagttcgtgatcaccggcgagggcatcggctaccccttcaagggcaagcaggccatcaacctgtgcgtggtggagggcggccccttgcccttcgccgaggacatcttgtccgccgccttcatgtacggcaaccgcgtgttcaccgagtacccccaggacatcgtcgactacttcaagaactcctgccccgccggctacacctgggaccgctccttcctgttcgaggacggcgccgtgtgcatctgcaacgccgacatcaccgtgagcgtggaggagaactgcatgtaccacgagtccaagttctacggcgtgaacttccccgccgacggccccgtgatgaagaagatgaccgacaactgggagccctcctgcgagaagatcatccccgtgcccaagcagggcatcttgaagggcgacgtgagcatgtacctgctgctgaaggacggtggccgcttgcgctgccagttcgacaccgtgtacaaggccaagtccgtgccccgcaagatgcccgactggcacttcatccagcacaagctgacccgcgaggaccgcagcgacgccaagaaccagaagtggcacctgaccgagcacgccatcgcctccggctccgccttgccctccggactcagatctcgatagggtaccaatggccagttaacagatccagctgctgctgttctagggttcacaagtctgcctatttgtcttccccaatggagctatggttgtctggtctggtccttggtcgtgtcccgtttcattgtgtactatttacctgtaatgtgtatccttaagtctggtttgatggtgtctgaaacgttttgctgtggtagagcagcatggaagaactataatgaataagtgatccctaatcattgtgtccaaattttgcttctgctatacccttttgtgctgtttcttatgttttgcttaaaaatttgatctgacaaacaaatttgtctaaattatgctcttgttctgactgtgtactgtacacatttgtattgctaccggtttggcacatagttttctctttgattgcagatcaaacccttctgattgcagattgcttggctatggctgatgtgctcactgttcttctttagcttgtatattgctgatggtggcttggctacggctgaaaaagttgctgctgcgccgacttggcaactgttgctccagtaatgctttgtcctctcttcctagccgccgacttggcacttggcagctgttgctcctgtaatgcgttgttatctcttatctcttgagatgtactatgattttgaggctgtttgacttgtgccagattgccagtgctgatgctatattatctcaggtttttatgctagtatatgttttactgtgtgctgcctgtgtcgagttacgtaatctattgaaccgctatgcgtgttgatgccctgttgttgcttgccagattgatgcccctgttgcttgcagcttgcaagctgtagtgaaatcctaaaattcgaaaccaaatctattctgaacttttgaagatctgtgatgtccggaagaaaagattaaaacagataaacgggactctccagaatctataaaataaatgatcgacaaacgctttgctttggtaggcttcctagttagttagcggaccgaagcttcggttgtttctgtggccgaattcaatcactagagtcgacctgcatgattccgatgacttcgtaggttcctagctcaagccgctcgtgtccaagcgtcacttacgattagctaatgattacggcatctaggaccgactagctagctagctaagagctcggtaccgagctcgaattcattccgattaatcgtggcctcttgctcttcaggatgaagagctatgtttaaacgtgcaagcgctactagacaattcagtacattaaaaacgtccgcaatgtgttattaagttgtctaagcgtcaatttgtttacaccacaatatatcctgccaccagccagccaacagctccccgaccggcagctcggcacaaaatcaccactcgatacaggcagcccatcagtccgggacggcgtcagcgggagagccgttgtaaggcggcagactttgctcatgttaccgatgctattcggaagaacggcaactaagctgccgggtttgaaacacggatgatctcgcggagggtagcatgttgattgtaacgatgacagagcgttgctgcctgtgatcaaatatcatctccctcgcagagatccgaattatcagccttcttattcatttctcgcttaaccgtgacaggctgtcgatcttgagaactatgccgacataataggaaatcgctggataaagccgctgaggaagctgagtggcgctatttctttagaagtgaacgttgacgatcgtcgggcccaggtagaatccgcctgagtcgcaagggtgacttcgcctatattggacgacggcgcgcagagggcgacctctttttgggttacgattgtaggattatcactaaaacaatacatgaacatattcaaatggcaatctctctaaggcattggaaataaatacaaataacagttgggtggagtttttcgacctgtgggcgttaaccttctgttaacctaaaagctcttgcccaaacagcagaatcggcgctaattgccagcggcggaacttttccagtttcgcgaaaaatatcgccactggcaaggaatgggtttgagatggcgaagtctgtcctaaaagcagcgcctgtagttgtagggttgacggccttgatggagcgtcatgccgatgccctctcgagccaacttcaagcacatcatcttaaggttttcccgccgcattccgagaagggcattcgaacattcgggccatcggaggcgtccaagctgctcggcgttggcgagtcatatttacggcagaccgcgtctgagatgccagagttgaatgttagcatgagcccgggtggcaggcgaatgttctcaattga

SEQ ID NO: 16 - DNA, 29352 bp, Artificial sequence
  Synthetic
gtttacccgccaatatatcctgtcaaacactgcggccgcacttgaccgcggatggagccggagctgtggtgaggccatcgacgggaggtgggggagaacacagtctcagtgttctttgtgagtccgcaaggtttttagcttttctgtattaattaaggttgctgttggctgtagaatacggtcgtggaagagctgtatcggtagctactacgtaagctattatatactggaagtctggagctcgtcgatctccggtcgtcttcctccatttctcctcgtcttgctttgactgctgctaccatttgcttctgttttctgatgaagcatgccatgtcggccaccagtgtttgtgtggtttttgcagggaatggctttcaagtgctgtgattgaatggccctcgtcgtcctcggctgagctcacatggacgcgtcatgtgagtgagatatatgatcatatgatgagtggggttcgggtgagtgcgtacttgaagtaggatcccgctttcactcattcattcattggcctttaaaccgggaaattttcgcgaggagatggagggaagcaagcagggtgacgagtgcagagtgccgcgagcgctttgtcaaaaggcaccgccgtaggcaaaaaaatcaatggccctgactgactcgatggtagtactactgtagagactagagagggttgctccccatatcttcgtgtgacttttactccagcattgcatttccgtcattgagacgttaattaatagcagctttcgggacagatgactgtggccatgtttcgtcacggccgcttcgtgccagctgggggtactatagtactgtgattttgttagtaaaaactttcattaggccaccattgacgaccgggccttcgcttttgctgcgctaattaaccatttcccggcgaccgaagggaacatgaacatgccccgacacatgagggcatgaggactagtgttctccctgtcgttcgttgacttgactagtgatagtttaaacgctcttcaactggaagagcggttactaccggttcactagctagctgctaatcgagctagttaccctatgaggtgacatgaagcgctcacggttactatgacggttagcttcacgactgttggtggcagtagcgtacgacttagctatagttccggacttacctagctaataacttcgtatagcatacattatacgaagttatggttaccgagctgttaccaagcggccgcacactgatagtttaaactgaaggcgggaaacgacaatctgatcatgagcggagaattaagggagtcacgttatgacccccgccgatgacgcgggacaagccgttttacgtttggaactgacagaaccgcaacgattgaaggagccactcagccgcgggtttctggagtttaatgagctaagcacatacgtcagaaaccattattgcgcgttcaaaagtcgcctaaggtcactatcagctagcaaatatttcttgtcaaaaatgctccactgacgttccataaattcccctcggtatccaattagagtctcatattcactcccatggcggccaatgcgggcggcggtggagcgggaggaggcagcggcagcggcagcgtggctgcgccggcggtgtgccgccccagcggctcgcggtggacgccgacgccggagcagatcaggatgctgaaggagctctactacggctgcggcatccggtcgcccagctcggagcagatccagcgcatcaccgccatgctgcggcagcacggcaagatcgagggcaagaacgtcttctactggttccagaaccacaaggcccgcgagcgccagaagcgccgcctcaccagcctcgacgtcaacgtgcccgccgccggcgcggccgacgccaccaccagccaactcggcgtcctctcgctgtcgtcgccgccgccttcaggcgcggcgcctccctcgcccaccctcggcttctacgccgccggcaatggcggcggatcggctgtgctgctggacacgagttccgactggggcagcagcggcgctgctatggccaccgagacatgcttcctgcaggactacatgggcgtgacggacacgggcagctcgtcgcagtggccacgcttctcgtcgtcggacacgataatggcggcggccgcggcgcgggcggcgacgacgcgggcgcccgagacgctccctctcttcccgacctgcggcgacgacggcggcagcggtagcagcagctacttgccgttctggggtgccgcgtccacaactgccggcgccacttcttccgttgcgatccaacagcaacaccagctgcaggagcagtacagcttttacagcaacagcaacagcacccagctggccggcaccggcaaccaagacgtatcggcaacagcagcagcagccgccgccctggagctgagcctcagctcatggtgctccccttaccctgctgcagggagtatgtgagagcaacgcgagctgccactgctcttcactgatgtctctggaatggaaggaggaggaagtgagaacagatcattcgacaaagcagcattagtccgttgatcggtggaagaccactcgtcagtgttgagttgaatgtttgatcaataaaatacggcaatgctgtaagggttgttttttatgccattgataatacactgtactgttcagttgttgaactctatttcttagccatgccaagtgcttttcttattttgaataacattacagcaaaaagttgaaagacaaaaaaaaaaacccccgaacagagtgctttgggtcccaagcttctttagactgtgttcggcgttccccctaaatttctccccctatatctcactcacttgtcacatcagcgttctctttccccctatatctccacgctctacagcagttccacctatatcaaacctctataccccaccacaacaatattatatactttcatcttcaactaactcatgtaccttccaatttttttctactaataattatttacgtgcacagaaacttagcaaggagagagagagcgggaatttaaatgctcggcgttaggcttttagtccgctaggtggctagaccgaggttaggacgctagttcactaggggcctagtggtgttttaagacgtcacggtcactacgaatcgaccgaagcttgcatgggccgcatcgagcagctggcttgtggggaccagacaaaaaaggaatggtgcagaattgttaggcgcacctaccaaaagcatctttgcctttattgcaaagataaagcagattcctctagtacaagtggggaacaaaataacgtggaaaagagctgtcctgacagcccactcactaatgcgtatgacgaacgcagtgacgaccacaaaactcgagcaacgagatcatgagccaatcaaagaggagtgatgtagacctaaagcaataatggagccatgacgtaagggcttacgcccatacgaaataattaaaggctgatgtgacctgtcggtctctcagaacctttactttttatgtttggcgtgtatttttaaatttccacggcaatgacgatgtgaccgtcgacccactaaaacattgctttgtcaaaagctaaaaaagatgatgcccgacagccacttgtgtgaagcatgagaagccggtccctccactaagaaaattagtgaagcatcttccagtggtccctccactcacagctcaatcagtgagcaacaggacgaaggaaatgacgtaagccatgacgtctaatcccagggccagcttgcatgcctgcagtgcagcgtgacccggtcgtgcccctctctagagataatgagcattgcatgtctaagttataaaaaattaccacatattttttttgtcacacttgtttgaagtgcagtttatctatctttatacatatatttaaactttactctacgaataatataatctatagtactacaataatatcagtgttttagagaatcatataaatgaacagttagacatggtctaaaggacaattgagtattttgacaacaggactctacagttttatctttttagtgtgcatgtgttctcctttttttttgcaaatagcttcacctatataatacttcatccattttattagtacatccatttagggtttagggttaatggtttttatagactaatttttttagtacatctattttattctattttagcctctaaattaagaaaactaaaactctattttagtttttttatttaataatttagatataaaatagaataaaataaagtgactaaaaattaaacaaataccctttaagaaattaaaaaaactaaggaaacatttttcttgtttcgagtagataatgccagcctgttaaacgccgtcgacgagtctaacggacaccaaccagcgaaccagcagcgtcgcgtcgggccaagcgaagcagacggcacggcatctctgtcgctgcctctggacccctctcgagagttccgctccaccgttggacttgctccgctgtcggcatccagaaattgcgtggcggagcggcagacgtgagccggcacggcaggcggcctcctcctcctctcacggcaccggcagctacgggggattcctttcccaccgctccttcgctttcccttcctcgcccgccgtaataaatagacaccccctccacaccctctttccccaacctcgtgttgttcggagcgcacacacacacaaccagatctcccccaaatccacccgtcggcacctccgcttcaaggtacgccgctcgtcctcccccccccccctctctaccttctctagatcggcgttccggtccatgcatggttagggcccggtagttctacttctgttcatgtttgtgttagatccgtgtttgtgttagatccgtgctgctagcgttcgtacacggatgcgacctgtacgtcagacacgttctgattgctaacttgccagtgtttctctttggggaatcctgggatggctctagccgttccgcagacgggatcgatttcatgattttttttgtttcgttgcatagggtttggtttgcccttttcctttatttcaatatatgccgtgcacttgtttgtcgggtcatcttttcatgcttttttttgtcttggttgtgatgatgtggtctggttgggcggtcgttctagatcggagtagaattctgtttcaaactacctggtggatttattaattttggatctgtatgtgtgtgccatacatattcatagttacgaattgaagatgatggatggaaatatcgatctaggataggtatacatgttgatgcgggttttactgatgcatatacagagatgctttttgttcgcttggttgtgatgatgtggtgtggttgggcggtcgttcattcgttctagatcggagtagaatactgtttcaaactacctggtgtatttattaattttggaactgtatgtgtgtgtcatacatcttcatagttacgagtttaagatggatggaaatatcgatctaggataggtatacatgttgatgtgggttttactgatgcatatacatgatggcatatgcagcatctattcatatgctctaaccttgagtacctatctattataataaacaagtatgttttataattattttgatcttgatatacttggatgatggcatatgcagcagctatatgtggatttttttagccctgccttcatacgctatttatttgcttggtactgtttcttttgtcgatgctcaccctgttgtttggtgttacttctgcaggtcgactttaacttagcctaggatccatggccactgtgaacaactggctcgctttctccctctccccgcaggagctgccgccctcccagacgacggactccacactcatctcggccgccaccgccgaccatgtctccggcgatgtctgcttcaacatcccccaagattggagcatgaggggatcagagctttcggcgctcgtcgcggagccgaagctggaggacttcctcggcggcatctccttctccgagcagcatcacaaggccaactgcaacatgatacccagcactagcagcacagtttgctacgcgagctcaggtgctagcaccggctaccatcaccagctgtaccaccagcccaccagctcagcgctccacttcgcggactccgtaatggtggcttcctcggccggtgtccacgacggcggtgccatgctcagcgcggccgccgctaacggtgtcgctggcgctgccagtgccaacggcggcggcatcgggctgtccatgattaagaactggctgcggagccaaccggcgcccatgcagccgagggtggcggcggctgagggcgcgcaggggctctctttgtccatgaacatggcggggacgacccaaggcgctgctggcatgccacttctcgctggagagcgcgcacgggcgcccgagagtgtatcgacgtcagcacagggtggagccgtcgtcgtcacggcgccgaaggaggatagcggtggcagcggtgttgccggcgctctagtagccgtgagcacggacacgggtggcagcggcggcgcgtcggctgacaacacggcaaggaagacggtggacacgttcgggcagcgcacgtcgatttaccgtggcgtgacaaggcatagatggactgggagatatgaggcacatctttgggataacagttgcagaagggaagggcaaactcgtaagggtcgtcaagtctatttaggtggctatgataaagaggagaaagctgctagggcttatgatcttgctgctctgaagtactggggtgccacaacaacaacaaattttccagtgagtaactacgaaaaggagctcgaggacatgaagcacatgacaaggcaggagtttgtagcgtctctgagaaggaagagcagtggtttctccagaggtgcatccatttacaggggagtgactaggcatcaccaacatggaagatggcaagcacggattggacgagttgcagggaacaaggatctttacttgggcaccttcagcacccaggaggaggcagcggaggcgtacgacatcgcggcgatcaagttccgcggcctcaacgccgtcaccaacttcgacatgagccgctacgacgtgaagagcatcctggacagcagcgccctccccatcggcagcgccgccaagcgcctcaaggaggccgaggccgcagcgtccgcgcagcaccaccacgccggcgtggtgagctacgacgtcggccgcatcgcctcgcagctcggcgacggcggagccctggcggcggcgtacggcgcgcactaccacggcgccgcctggccgaccatcgcgttccagccgggcgccgccagcacaggcctgtaccacccgtacgcgcagcagccaatgcgcggcggcgggtggtgcaagcaggagcaggaccacgcggtgatcgcggccgcgcacagcctgcaggacctccaccacctgaacctgggcgcggccggcgcgcacgactttttctcggcagggcagcaggccgccgccgctgcgatgcacggcctgggtagcatcgacagtgcgtcgctcgagcacagcaccggctccaactccgtcgtctacaacggcggggtcggcgacagcaacggcgccagcgccgtcggcggcagtggcggtggctacatgatgccgatgagcgctgccggagcaaccactacatcggcaatggtgagccacgagcaggtgcatgcacgggcctacgacgaagccaagcaggctgctcagatggggtacgagagctacctggtgaacgcggagaacaatggtggcggaaggatgtctgcatgggggactgtcgtgtctgcagccgcggcggcagcagcaagcagcaacgacaacatggccgccgacgtcgggcatggcggcgcgcagctcttcagtgtctggaacgacacttaagcgtacctagtggtacctgacatcttatagtctgcaacctctcgtgtctgaattcctatctttatcaagtgttattgcttccacgactataggacagctttcgtcgaaagcttttgctcatgtgatctcgaaggattcatctagtctgatttttcgtgacttgtatcggttttattggattcatccaacatatatcaataaaaaatgagttgtgtttcctttcttcctagttcagttaaaattatttccctcctgcgcttgtgctgtaattgtctgtgtacctgttgtttgtgactgtgttagttcccttggatatgatttcgtatttgatatgtacatggagatagcttagcttcattattggagtatgaagttagtatgacatagtcactctcctggaaaattgacactgcaaaccatatttttattctgaaccacaaatcctagtcagtccgctggcatatgccgtccgtttgctgaatccagaacgtgggtttggagatgtacggctgagatgcctctatgcgaaggggatttcgtggtgaaacgagatgggagtagagcaacgcccgtggaagatgcttcaaacttccacacttttgagcaacgatcggcagtagtaaggtagacgatttcaagatcaaagcatatgaagataaacaacatcaacaacaaaatttgttggggttctatagagagaaacagagctacatacatacactgttttgtatctaccatctgagatgatgaaaagatgaaaaactaaagaatgccccggcgccaacgccaggacacgccgcgcgcgcgtcacccgagccatctcttgacccagccggcgctgtatatttacacacgttgcagcatcgatcaccacctgttcgatcgcgtcgccgtcaccggcgcgccgcgacttattgaactagtctagggcgcggctaacaacctagcttagattgccttgtctaaacccttaggctaacgcgccactctagacaccttgctagttggatattacctcttctcttcaaagtatccttgaacgctcaccggttatcaaatctctacactatagctctgtagtcttgctagatagttagttctttagctctcgaattcgagctcggtaccctggttcacaaactcaatacaacacacagtggagtagggtattacgctccggcggcccgaaccactctaaatccttgtgtcctcgtgtgctcttccaccattaatgactgtaattgcagggacacgaagagttgtagcgcttttgccaacaagatccgctatatgctagtagagtggaacctgcacagcaacaagcatccaataatctgagaataagaattatgtgtggtgatggttctcatctctgcaactcgccattttcgcgagagaaccaaatccaagttggtgaagatcatgatttgggctcatgggctggcatagtagctattacctttgcaattgtggttcgaatctatccgatattctccttttcagggagagctaatgcttatgcttattgggtattttggtttgacactgcttcacgcccaaaaaaaggcaactatgtctgagttggatatggcccaaaaaaaggcagctatgtctgagttggatatggaagtcttctttcgtttagggtgaagtaagaccaagctcatgagcttattatcttaggtcggaacaaattagttgataggcatggcacatttatcaaattataatgattttaacagaaaagcaacacctctttttcagcagcaccagctttgcaagctgcaattgacactccaagcatagtatttgctccaaactcagcctgcatttcgcacaatatcatatctatttccatttggataaaatatattttccagaaatatgggaacagaatcaagatacagaaaaaagttgtggtagtagtggtaagtggaaacacaagtacagtgaaaagatagcattatttctgaacagtcaaattaaccgaaataagtagtatcacatactgcccctaaattgactacacccaatgtaaagaattgcttgagcatattgagccatcagttgtttgtttgtgtaacggatttgacaatgcagagttcaggagcaaaaaaccgcaaaggagagaaagagggaaaggatctcctagtatcccaccttgtggcgcgccctgtcaagtgcatgatggcctggtcgatctgcgtctgctgctgcggttccatcccaacgagtgcctccgacaccttgtcgttgatcacccgcaccgcgtaggcgacccccctggcgaggaacttccgcctctcggaggccccggccgcgtcggcggcggcgccctcgagcgcgcccacgctagccgtagatgctcggtgcacggccttgttggtgtgcaactcgacctcaacggccggtgcgctacgcccgtcaaggatctggcgcgcccgcaccctcgtgatcacggtgggcgcctcccgcctcatgtggccgacgatgaaaagcgccgggttaggggccttggcgcgcaccgccgtattcagggcctcctcgctcttgcgcgagagcaggtgcttccccaggtactcctgcactgacaaggctgccacagcggtggaatttgtcctcacgacttcgccacgtcgtcctcacctccctggcttcccacgactccgccgtatcgaggtgctcggtgggtcgtcttaatccgaagtccgaactaggaagacgagacagagaggtctgaggaatgggcctcgtttgatgttgagctgaattatttttccagcataagcccaggtcttggtccatgaacaaaattactagaaacccagcccagtactacgatctaaaagagggactgccactggatagctctctctagcattctccacgctccaatacagcggcgtcgtgtctatccgggtctatccgcgaacacgtgagaactctccagaaactgctttctcctccacttcatctctctcgctttccctctataaaaagaccccttctaggaattgagggagacagcaagcaccaagcagcgatccgaagctcaatcaattcactcaaacctcttccccaaatcttcgattagatcttcgttgacaagaagactagaaccgaacctgacatgtccaacctgctcacggttcaccagaaccttccggctcttccagtggacgcgacgtccgatgaagtcaggaagaacctcatggacatgttccgcgacaggcaagcgttcagcgagcacacctggaagatgctgctctccgtctgccgctcctgggctgcatggtgcaagctgaacaacaggaagtggttccccgctgagcccgaggacgtgagggattaccttctgtacctgcaagcgcgaggtttgtttctgcttctacctttgatatatatataataattatcattaattagtagtaatataatatttcaaatatttttttcaaaataaaagaatgtagtatatagcaattgcttttctgtagtttataagtgtgtatattttaatttataacttttctaatatatgaccaaaacatggtgatgcctaggtctggcagtgaagaccatccagcaacaccttggacaactgaacatgcttcacaggcgctccggcctcccgcgccccagcgactcgaacgccgtgagcctcgtcatgcgccgcatcaggaaggaaaacgtcgatgccggcgaaagggcaaagcaggccctcgcgttcgagaggaccgatttcgaccaggtccgcagcctgatggagaacagcgacaggtgccaggacattaggaacctggcgttcctcggaattgcatacaacacgctcctcaggatcgcggaaattgcccgcattcgcgtgaaggacattagccgcaccgacggcggcaggatgcttatccacattggcaggaccaagacgctcgtttccaccgcaggcgtcgaaaaggccctcagcctcggagtgaccaagctcgtcgaacgctggatctccgtgtccggcgtcgcggacgacccaaacaactacctcttctgccgcgtccgcaagaacggggtggctgcccctagcgccaccagccaactcagcacgagggccttggaaggtattttcgaggccacccaccgcctgatctacggcgcgaaggatgacagcggtcaacgctacctcgcatggtccgggcactccgcccgcgttggagctgctagggacatggcccgcgccggtgtttccatccccgaaatcatgcaggcgggtggatggacgaacgtgaacattgtcatgaactacattcgcaaccttgacagcgagacgggcgcaatggttcgcctcctggaagatggtgactgaggtacccaacctagacttgtccatcttctggattggccaacttaattaatgtatgaaataaaaggatgcacacatagtgacatgctaatcactataatgtgggcatcaaagttgtgtgttatgtgtaattactagttatctgaataaaagagaaagagatcatccatatttcttatcctaaatgaatgtcacgtgtctttataattctttgatgaaccagatgcatttcattaaccaaatccatatacatataaatattaatcatatataattaatatcaattgggttagcaaaacaaatctagtctaggtgtgttttgcgatccgatatcaggcctgacgtctaaaaacggcccctaactaacgcttagttgcccgctagattagtcccccgttagtgcctagttagacacacgacgaactaggggctagccaccttgctagttggatattacctcttctcttcaaagtatccttgaacgctcaccggttatcaaatctctacactatagctctgtagtcttgctagatagttagttctttagctctcgtgcgcacgataacttcgtatagcatacattatacgaagttataacagcggaccgggttaccgaattcctgcccaactttgtatagaaaagttgggccgaattcgagctcggtacggccagaatggcccggaccgaagcttgcatgcctgcagtgcagcgtgacccggtcgtgcccctctctagagataatgagcattgcatgtctaagttataaaaaattaccacatattttttttgtcacacttgtttgaagtgcagtttatctatctttatacatatatttaaactttactctacgaataatataatctatagtactacaataatatcagtgttttagagaatcatataaatgaacagttagacatggtctaaaggacaattgagtattttgacaacaggactctacagttttatctttttagtgtgcatgtgttctcctttttttttgcaaatagcttcacctatataatacttcatccattttattagtacatccatttagggtttagggttaatggtttttatagactaatttttttagtacatctattttattctattttagcctctaaattaagaaaactaaaactctattttagtttttttatttaataatttagatataaaatagaataaaataaagtgactaaaaattaaacaaataccctttaagaaattaaaaaaactaaggaaacatttttcttgtttcgagtagataatgccagcctgttaaacgccgtcgacgagtctaacggacaccaaccagcgaaccagcagcgtcgcgtcgggccaagcgaagcagacggcacggcatctctgtcgctgcctctggacccctctcgagagttccgctccaccgttggacttgctccgctgtcggcatccagaaattgcgtggcggagcggcagacgtgagccggcacggcaggcggcctcctcctcctctcacggcaccggcagctacgggggattcctttcccaccgctccttcgctttcccttcctcgcccgccgtaataaatagacaccccctccacaccctctttccccaacctcgtgttgttcggagcgcacacacacacaaccagatctcccccaaatccacccgtcggcacctccgcttcaaggtacgccgctcgtcctcccccccccccctctctaccttctctagatcggcgttccggtccatgcatggttagggcccggtagttctacttctgttcatgtttgtgttagatccgtgtttgtgttagatccgtgctgctagcgttcgtacacggatgcgacctgtacgtcagacacgttctgattgctaacttgccagtgtttctctttggggaatcctgggatggctctagccgttccgcagacgggatcgatttcatgattttttttgtttcgttgcatagggtttggtttgcccttttcctttatttcaatatatgccgtgcacttgtttgtcgggtcatcttttcatgcttttttttgtcttggttgtgatgatgtggtctggttgggcggtcgttctagatcggagtagaattctgtttcaaactacctggtggatttattaattttggatctgtatgtgtgtgccatacatattcatagttacgaattgaagatgatggatggaaatatcgatctaggataggtatacatgttgatgcgggttttactgatgcatatacagagatgctttttgttcgcttggttgtgatgatgtggtgtggttgggcggtcgttcattcgttctagatcggagtagaatactgtttcaaactacctggtgtatttattaattttggaactgtatgtgtgtgtcatacatcttcatagttacgagtttaagatggatggaaatatcgatctaggataggtatacatgttgatgtgggttttactgatgcatatacatgatggcatatgcagcatctattcatatgctctaaccttgagtacctatctattataataaacaagtatgttttataattattttgatcttgatatacttggatgatggcatatgcagcagctatatgtggatttttttagccctgccttcatacgctatttatttgcttggtactgtttcttttgtcgatgctcaccctgttgtttggtgttacttctgcaggtcgactttaacttagcctaggatccatggcaccgaagaagaagcgcaaggtgatggacaagaagtacagcatcggcctcgacatcggcaccaactcggtgggctgggccgtcatcacggacgaatataaggtcccgtcgaagaagttcaaggtcctcggcaatacagaccgccacagcatcaagaaaaacttgatcggcgccctcctgttcgatagcggcgagaccgcggaggcgaccaggctcaagaggaccgccaggagacggtacactaggcgcaagaacaggatctgctacctgcaggagatcttcagcaacgagatggcgaaggtggacgactccttcttccaccgcctggaggaatcattcctggtggaggaggacaagaagcatgagcggcacccaatcttcggcaacatcgtcgacgaggtaagtttctgcttctacctttgatatatatataataattatcattaattagtagtaatataatatttcaaatatttttttcaaaataaaagaatgtagtatatagcaattgcttttctgtagtttataagtgtgtatattttaatttataacttttctaatatatgaccaaaacatggtgatgtgcaggtggcctaccacgagaagtacccgacaatctaccacctccggaagaaactggtggacagcacagacaaggcggacctccggctcatctaccttgccctcgcgcatatgatcaagttccgcggccacttcctcatcgagggcgacctgaacccggacaactccgacgtggacaagctgttcatccagctcgtgcagacgtacaatcaactgttcgaggagaaccccataaacgctagcggcgtggacgccaaggccatcctctcggccaggctctcgaaatcaagaaggctggagaaccttatcgcgcagttgccaggcgaaaagaagaacggcctcttcggcaaccttattgcgctcagcctcggcctgacgccgaacttcaaatcaaacttcgacctcgcggaggacgccaagctccagctctcaaaggacacctacgacgacgacctcgacaacctcctggcccagataggagaccagtacgcggacctcttcctcgccgccaagaacctctccgacgctatcctgctcagcgacatccttcgggtcaacaccgaaattaccaaggcaccgctgtccgccagcatgattaaacgctacgacgagcaccatcaggacctcacgctgctcaaggcactcgtccgccagcagctccccgagaagtacaaggagatcttcttcgaccaatcaaaaaacggctacgcgggatatatcgacggcggtgccagccaggaagagttctacaagttcatcaaaccaatcctggagaagatggacggcaccgaggagttgctggtcaagctcaacagggaggacctcctcaggaagcagaggaccttcgacaacggctccatcccgcatcagatccacctgggcgaactgcatgccatcctgcggcgccaggaggacttctacccgttcctgaaggataaccgggagaagatcgagaagatcttgacgttccgcatcccatactacgtgggcccgctggctcgcggcaactcccggttcgcctggatgacccggaagtcggaggagaccatcacaccctggaactttgaggaggtggtcgataagggcgctagcgctcagagcttcatcgagcgcatgaccaacttcgataaaaacctgcccaatgaaaaagtcctccccaagcactcgctgctctacgagtacttcaccgtgtacaacgagctcaccaaggtcaaatacgtcaccgagggcatgcggaagccggcgttcctgagcggcgagcagaagaaggcgatagtggacctcctcttcaagaccaacaggaaggtgaccgtgaagcaattaaaagaggactacttcaagaaaatagagtgcttcgactccgtggagatctcgggcgtggaggatcggttcaacgcctcactcggcacgtatcacgacctcctcaagatcattaaagacaaggacttcctcgacaacgaggagaacgaggacatcctcgaggacatcgtcctcaccctgaccctgttcgaggaccgcgaaatgatcgaggagaggctgaagacctacgcgcacctgttcgacgacaaggtcatgaaacagctcaagaggcgccgctacactggttggggaaggctgtcccgcaagctcattaatggcatcagggacaagcagagcggcaagaccatcctggacttcctcaagtccgacgggttcgccaaccgcaacttcatgcagctcattcacgacgactcgctcacgttcaaggaagacatccagaaggcacaggtgagcgggcagggtgactccctccacgaacacatcgccaacctggccggctcgccggccattaaaaagggcatcctgcagacggtcaaggtcgtcgacgagctcgtgaaggtgatgggccggcacaagcccgaaaatatcgtcatagagatggccagggagaaccagaccacccaaaaagggcagaagaactcgcgcgagcggatgaaacggatcgaggagggcattaaagagctcgggtcccagatcctgaaggagcaccccgtggaaaatacccagctccagaatgaaaagctctacctctactacctgcagaacggccgcgacatgtacgtggaccaggagctggacattaatcggctatcggactacgacgtcgaccacatcgtgccgcagtcgttcctcaaggacgatagcatcgacaacaaggtgctcacccggtcggataaaaatcggggcaagagcgacaacgtgcccagcgaggaggtcgtgaagaagatgaaaaactactggcgccagctcctcaacgcgaaactgatcacccagcgcaagttcgacaacctgacgaaggcggaacgcggtggcttgagcgaactcgataaggcgggcttcataaaaaggcagctggtcgagacgcgccagatcacgaagcatgtcgcccagatcctggacagccgcatgaatactaagtacgatgaaaacgacaagctgatccgggaggtgaaggtgatcacgctgaagtccaagctcgtgtcggacttccgcaaggacttccagttctacaaggtccgcgagatcaacaactaccaccacgcccacgacgcctacctgaatgcggtggtcgggaccgccctgatcaagaagtacccgaagctggagtcggagttcgtgtacggcgactacaaggtctacgacgtgcgcaaaatgatcgccaagtccgagcaggagatcggcaaggccacggcaaaatacttcttctactcgaacatcatgaacttcttcaagaccgagatcaccctcgcgaacggcgagatccgcaagcgcccgctcatcgaaaccaacggcgagacgggcgagatcgtctgggataagggccgggatttcgcgacggtccgcaaggtgctctccatgccgcaagtcaatatcgtgaaaaagacggaggtccagacgggcgggttcagcaaggagtccatcctcccgaagcgcaactccgacaagctcatcgcgaggaagaaggattgggacccgaaaaaatatggcggcttcgacagcccgaccgtcgcatacagcgtcctcgtcgtggcgaaggtggagaagggcaagtcaaagaagctcaagtccgtgaaggagctgctcgggatcacgattatggagcggtcctccttcgagaagaacccgatcgacttcctagaggccaagggatataaggaggtcaagaaggacctgattattaaactgccgaagtactcgctcttcgagctggaaaacggccgcaagaggatgctcgcctccgcaggcgagttgcagaagggcaacgagctcgccctcccgagcaaatacgtcaatttcctgtacctcgctagccactatgaaaagctcaagggcagcccggaggacaacgagcagaagcagctcttcgtggagcagcacaagcattacctggacgagatcatcgagcagatcagcgagttctcgaagcgggtgatcctcgccgacgcgaacctggacaaggtgctgtcggcatataacaagcaccgcgacaaaccaatacgcgagcaggccgaaaatatcatccacctcttcaccctcaccaacctcggcgctccggcagccttcaagtacttcgacaccacgattgaccggaagcggtacacgagcacgaaggaggtgctcgatgcgacgctgatccaccagagcatcacagggctctatgaaacacgcatcgacctgagccagctgggcggagacaagagaccacgggaccgccacgatggcgagctgggaggccgcaagcgggcaaggtaggtaccgttaacctagacttgtccatcttctggattggccaacttaattaatgtatgaaataaaaggatgcacacatagtgacatgctaatcactataatgtgggcatcaaagttgtgtgttatgtgtaattactagttatctgaataaaagagaaagagatcatccatatttcttatcctaaatgaatgtcacgtgtctttataattctttgatgaaccagatgcatttcattaaccaaatccatatacatataaatattaatcatatataattaatatcaattgggttagcaaaacaaatctagtctaggtgtgttttgccccgggttaacggcaaacgctaattagtcactaggcccaggaaacactaactaagccctagcttatcctagcgcaacctagttaggtcttccccaagtttgtacaaaaaagcaggctccggccagaatggcccggaccgggtttgagagtacaatgatgaacctagattaatcaatgccaaagtctgaaaaatgcaccctcagtctatgatccagaaaatcaagattgcttgaggccctgttcggttgttccggattagagccccggattaattcctagccggattacttctctaatttatatagattttgatgagctggaatgaatcctggcttattccggtacaaccgaacaggccctgaaggataccagtaatcgctgagctaaattggcatgctgtcagagtgtcagtattgcagcaaggtagtgagataaccggcatcatggtgccagtttgatggcaccattagggttagagatggtggccatgggcgcatgtcctggccaactttgtatgatatatggcagggtgaataggaaagtaaaattgtattgtaaaaagggatttcttctgtttgttagcgcatgtacaaggaatgcaagttttgagcgagggggcatcaaagatctggctgtgtttccagctgtttttgttagccccatcgaatccttgacataatgatcccgcttaaataagcaacctcgcttgtatagttccttgtgctctaacacacgatgatgataagtcgtaaaatagtggtgtccaaagaatttccaggcccagttgtaaaagctaaaatgctattcgaatttctactagcagtaagtcgtgtttagaaattatttttttatataccttttttccttctatgtacagtaggacacagtgtcagcgccgcgttgacggagaatatttgcaaaaaagtaaaagagaaagtcatagcggcgtatgtgccaaaaacttcgtcacagagagggccataagaaacatggcccacggcccaatacgaagcaccgcgacgaagcccaaacagcagtccgtaggtggagcaaagcgctgggtaatacgcaaacgttttgtcccaccttgactaatcacaagagtggagcgtaccttataaaccgagccgcaagcaccgaattgctcccccggccaccccctcgttttagagctagaaatagcaagttaaaataaggctagtccgttatcaacttgaaaaagtggcaccgagtcggtgctttttttttgcggccgcgaattcctgcagggccctcttgtcggaccagttgcccaccacgttggtgagctccagcttttgttccctttagtgagggttaattaccgaattcgagctcggtaccctgggatccgatatcgatgggccctggccgaagctttgagagtacaatgatgaacctagattaatcaatgccaaagtctgaaaaatgcaccctcagtctatgatccagaaaatcaagattgcttgaggccctgttcggttgttccggattagagccccggattaattcctagccggattacttctctaatttatatagattttgatgagctggaatgaatcctggcttattccggtacaaccgaacaggccctgaaggataccagtaatcgctgagctaaattggcatgctgtcagagtgtcagtattgcagcaaggtagtgagataaccggcatcatggtgccagtttgatggcaccattagggttagagatggtggccatgggcgcatgtcctggccaactttgtatgatatatggcagggtgaataggaaagtaaaattgtattgtaaaaagggatttcttctgtttgttagcgcatgtacaaggaatgcaagttttgagcgagggggcatcaaagatctggctgtgtttccagctgtttttgttagccccatcgaatccttgacataatgatcccgcttaaataagcaacctcgcttgtatagttccttgtgctctaacacacgatgatgataagtcgtaaaatagtggtgtccaaagaatttccaggcccagttgtaaaagctaaaatgctattcgaatttctactagcagtaagtcgtgtttagaaattatttttttatataccttttttccttctatgtacagtaggacacagtgtcagcgccgcgttgacggagaatatttgcaaaaaagtaaaagagaaagtcatagcggcgtatgtgccaaaaacttcgtcacagagagggccataagaaacatggcccacggcccaatacgaagcaccgcgacgaagcccaaacagcagtccgtaggtggagcaaagcgctgggtaatacgcaaacgttttgtcccaccttgactaatcacaagagtggagcgtaccttataaaccgagccgcaagcaccgaattgcccaaaacgctttcccgatgttttagagctagaaatagcaagttaaaataaggctagtccgttatcaacttgaaaaagtggcaccgagtcggtgctttttttttgcggccgcgaattcctgcagggccctcttgtcggaccagttgcccaccacgttggtgaggggcacccagctttcttgtacaaagtggccgttaacggatcggccagaatggcccggaccgggttaccgaattcgagctcggtaccctgggatccgatatcgatgggccctggccgaagctttgagagtacaatgatgaacctagattaatcaatgccaaagtctgaaaaatgcaccctcagtctatgatccagaaaatcaagattgcttgaggccctgttcggttgttccggattagagccccggattaattcctagccggattacttctctaatttatatagattttgatgagctggaatgaatcctggcttattccggtacaaccgaacaggccctgaaggataccagtaatcgctgagctaaattggcatgctgtcagagtgtcagtattgcagcaaggtagtgagataaccggcatcatggtgccagtttgatggcaccattagggttagagatggtggccatgggcgcatgtcctggccaactttgtatgatatatggcagggtgaataggaaagtaaaattgtattgtaaaaagggatttcttctgtttgttagcgcatgtacaaggaatgcaagttttgagcgagggggcatcaaagatctggctgtgtttccagctgtttttgttagccccatcgaatccttgacataatgatcccgcttaaataagcaacctcgcttgtatagttccttgtgctctaacacacgatgatgataagtcgtaaaatagtggtgtccaaagaatttccaggcccagttgtaaaagctaaaatgctattcgaatttctactagcagtaagtcgtgtttagaaattatttttttatataccttttttccttctatgtacagtaggacacagtgtcagcgccgcgttgacggagaatatttgcaaaaaagtaaaagagaaagtcatagcggcgtatgtgccaaaaacttcgtcacagagagggccataagaaacatggcccacggcccaatacgaagcaccgcgacgaagcccaaacagcagtccgtaggtggagcaaagcgctgggtaatacgcaaacgttttgtcccaccttgactaatcacaagagtggagcgtaccttataaaccgagccgcaagcaccgaattgcaatataaaattaccgatgttttagagctagaaatagcaagttaaaataaggctagtccgttatcaacttgaaaaagtggcaccgagtcggtgctttttttttgcggccgcgaattcctgcagggccctcttgtcggaccagttgcccaccacgttggtgaggggcaactttattatacaaagttgagctaactaactaggttaactcacttaagatgtactcgacaatggtgccctcataccggcatgtgtttcctagaaataatcaatatattgattgagatttatctcgatatatttctgaactatgttcatcatataaataactgaaaacatcaaatcgtaattttaaactcatgcttggtcaatacatagataatacaatattacttcatcatcccaatgatgtcctagcacaacctattgaatgttaatgtttggttgtgtgggggtgtgtttataacatagatgtgattatttgtgctttttgttgagtatatacatatatggtatgttgatttgatatagtgatggacacatgctttggccttggatattcaaatcacttgtacttgcacgaagcaaaacataatataagtttagaagtaaacttgtaactgtgtccaaacatgctcacacaaagtcatatcgcattatatttttttggtaaatattcaacacatgtattttttacaagaacccaaattttacagacaaatgcagcattgtagacatgtagaattctttgaagcatgtgaacttaacaacactaatgtcattaaatcaactggaccctatgagtaacaatttcgatattgcaaacaccaaattatggaacttatttgctgaaaaaattatgatcaatgtgaagtttaaattattataccataaatatatcaaagattttttttgaggaaggtaaaaattgcatggaatgggctgcccaacgtgatagctcacttttatgctaggtagcattaccaaagatgggaatgttctgatgaacaccaaacccactcaaataatatttatatttgggttgtttagttgtaaaagtgaagacccaagattaaagtaccaattgtcgatgccatacactagaagtgaagaatgttgttagcgttaggagtagatgtgtcaatggggaccgatactcgttatcgatgggccgcacgtaagcttgcatgcctgcagaatgcgaccttcttatgtgcttctagtctccaaatgtggttgatagttattttgctctaagatcaacagtaatgaagtataaatcatcgttgtggtgtgctactcggttaattgagcattaacacacacaaacatgacgaggatggtataatctccaaaaatgtgtactttgttaggtgggaccctatagccttgattaatgtgctatgttaggcatgcctggaaacgtgtgacgcatatgttttgtgaacctgttgatattatatgtgcttttatattaccatattttattaaaatactaatatttattactagtaagatataacattctatctagcttaaaaactaaccataaatattccataataactagatttaccaaactaatatactaaatatacataataaatacaaaattaacaagacaataatcaatatttatgagcttaatatatttagacattatggttggtcgacgataatcatgctaacttttcgtaattgcttgattgaaatatgcttagaataatgcctctttgttctacatggcaaatagggaccattatggtgtaacaccctgggaaccacaaacaccccgaaatgctactaaactacacaactaaccttcatatataaaatttcgacagcatctcctttgaaaatttgcatagacgtggaagcaacagagtataaacagatatcatgataagaaaacatactagacattaataatctgctagaaatgggaagaatcctaacttgacgactgcgtaactgactagagtcacacttagctgaccctagtcacttactgcccttaaggccaattgttcaagattcattcaacaattgaaacatctcccatgattaaatcagtataaggttgctatggtcttgcttgacaaagtttttttttgagggaatttcaactaaatttttgagtgaaactatcaaatactgattttaaaaaatttttataaaaggaagcgcagagataaaaggccatctatgctacaaaagtacccaaaaatgtaatcctaaagtatgaattgcattttttttttgtttggacgaaaggaaaggagtattaccacaagaatgatatcatcttcatatttagatcttttttgggtaaagcttgagattctctaaatatagagaaatcagaagaaaaaaaaaccgtgttttggtggttttgatttctagcctccacaataactttgacggcgtcgacaagtctaacggacaccaagcagcgaaccaccagcgccgagccaagcgaagcagacggccgagacgttgacaccttcggcgcggcatctctcgagagttccgctccggcgctccacctccaccgctggcggtttcttattccgttccgttccgcctcctgctctgctcctctccacaccacacggcacgaaaccgttacggcaccggcagcacccagcacgggagaggggattcctttcccaccgttccttccctttccgccccgccgctataaatagccagccccatccccagcttttttccccaatctcatctcctctctcctgttgttcggagcacacgcacaatccgatcgatccccaaatccccttcgtctctcctcgcgagcctcgtggatcccagcttcaaggtacggcgatcgatcatcccccctccttctctctaccttcttttctctagactacatcggatggcgatccatggttagggcctgctagtttcccttcctgttttgtcgatggctgcgaggcacaatagatctgatggcgttatgacggctaacttgtcatgttgttgcgatttatagtccctttaggagatcagtttaatttctcggatggttcgagatcggtggtccatggttagtaccctaagatccgcgctgttagggttcgtagatggaggcgacctgttctgattgttaacttgtcagtacctgggaaatcctgggatggttctagctcgtccgcagatgagatcgatttcatgatcctctgtatcttgtttcgttgcctaggttccgtctaatctatccgtggtatgatgtagatgttttgatcgtgctaactacgtcttgtaaagttaattgtcaggtcataatttttagcatgcctttttttttgtttggttttgtctaattgggctgtcgttctagatcagagtagaagactgttccaaactacctgctggatttattgaacttggatctgtatgtgtgtcacatatcttcataaattcatgattaagatggattgaaatatcttttatctttttggtatggatagttctatatgttggtgtggctttgttagatgtatacatgcttagatacatgaagcaacgtgctgctactgtttagtaattgctgttcatttgtctaataaacagataaggatatgtatttatgttgctgttggttttgctggtactttgttggatacaaatgcttcaatacagaaaacagcatgctgctacgatttaccatttatctaatcttatcatatgtctaatctaataaacaaacatgcttttaaattatcttcatatgcttggatgatggcatacacagcggctatgtgtggttttttaaatacccagcatcatgggcatgcatgacactgctttaatatgctttttatttgcttgagactgtttcttttgtttatactgaccctttagttcggtgactcttctgcaggtcgactttaacttagcctaggatccatggcccagtccaagcacggcctgaccaaggagatgaccatgaagtaccgcatggagggctgcgtggacggccacaagttcgtgatcaccggcgagggcatcggctaccccttcaagggcaagcaggccatcaacctgtgcgtggtggagggcggccccttgcccttcgccgaggacatcttgtccgccgccttcatgtacggcaaccgcgtgttcaccgagtacccccaggacatcgtcgactacttcaagaactcctgccccgccggctacacctgggaccgctccttcctgttcgaggacggcgccgtgtgcatctgcaacgccgacatcaccgtgagcgtggaggagaactgcatgtaccacgagtccaagttctacggcgtgaacttccccgccgacggccccgtgatgaagaagatgaccgacaactgggagccctcctgcgagaagatcatccccgtgcccaagcagggcatcttgaagggcgacgtgagcatgtacctgctgctgaaggacggtggccgcttgcgctgccagttcgacaccgtgtacaaggccaagtccgtgccccgcaagatgcccgactggcacttcatccagcacaagctgacccgcgaggaccgcagcgacgccaagaaccagaagtggcacctgaccgagcacgccatcgcctccggctccgccttgccctccggactcagatctcgatagggtaccaatggccagttaacagatccagctgctgctgttctagggttcacaagtctgcctatttgtcttccccaatggagctatggttgtctggtctggtccttggtcgtgtcccgtttcattgtgtactatttacctgtaatgtgtatccttaagtctggtttgatggtgtctgaaacgttttgctgtggtagagcagcatggaagaactataatgaataagtgatccctaatcattgtgtccaaattttgcttctgctatacccttttgtgctgtttcttatgttttgcttaaaaatttgatctgacaaacaaatttgtctaaattatgctcttgttctgactgtgtactgtacacatttgtattgctaccggtttggcacatagttttctctttgattgcagatcaaacccttctgattgcagattgcttggctatggctgatgtgctcactgttcttctttagcttgtatattgctgatggtggcttggctacggctgaaaaagttgctgctgcgccgacttggcaactgttgctccagtaatgctttgtcctctcttcctagccgccgacttggcacttggcagctgttgctcctgtaatgcgttgttatctcttatctcttgagatgtactatgattttgaggctgtttgacttgtgccagattgccagtgctgatgctatattatctcaggtttttatgctagtatatgttttactgtgtgctgcctgtgtcgagttacgtaatctattgaaccgctatgcgtgttgatgccctgttgttgcttgccagattgatgcccctgttgcttgcagcttgcaagctgtagtgaaatcctaaaattcgaaaccaaatctattctgaacttttgaagatctgtgatgtccggaagaaaagattaaaacagataaacgggactctccagaatctataaaataaatgatcgacaaacgctttgctttggtaggcttcctagttagttagcggaccgaagcttcggttgtttctgtggccgaattcaatcactagagtcgacctgcatgattccgatgacttcgtaggttcctagctcaagccgctcgtgtccaagcgtcacttacgattagctaatgattacggcatctaggaccgactagctagctagctaagagctcggtaccgagctcgaattcattccgattaatcgtggcctcttgctcttcaggatgaagagctatgtttaaacgtgcaagcgctactagacaattcagtacattaaaaacgtccgcaatgtgttattaagttgtctaagcgtcaatttgtttacaccacaatatatcctgcca

SEQ ID NO: 17 - DNA, 8117 bp, Artificial sequence
  Synthetic
gtttacccgccaatatatcctgtcaaacactgcggccgcacttgaccgcggatggagccggagctgtggtgaggccatcgacgggaggtgggggagaacacagtctcagtgttctttgtgagtccgcaaggtttttagcttttctgtattaattaaggttgctgttggctgtagaatacggtcgtggaagagctgtatcggtagctactacgtaagctattatatactggaagtctggagctcgtcgatctccggtcgtcttcctccatttctcctcgtcttgctttgactgctgctaccatttgcttctgttttctgatgaagcatgccatgtcggccaccagtgtttgtgtggtttttgcagggaatggctttcaagtgctgtgattgaatggccctcgtcgtcctcggctgagctcacatggacgcgtcatgtgagtgagatatatgatcatatgatgagtggggttcgggtgagtgcgtacttgaagtaggatcccgctttcactcattcattcattggcctttaaaccgggaaattttcgcgaggagatggagggaagcaagcagggtgacgagtgcagagtgccgcgagcgctttgtcaaaaggcaccgccgtaggcaaaaaaatcaatggccctgactgactcgatggtagtactactgtagagactagagagggttgctccccatatcttcgtgtgacttttactccagcattgcatttccgtcattgagacgttaattaatagcagctttcgggacagatgactgtggccatgtttcgtcacggccgcttcgtgccagctgggggtactatagtactgtgattttgttagtaaaaactttcattaggccaccattgacgaccgggccttcgcttttgctgcgctaattaaccatttcccggcgaccgaagggaacatgaacatgccccgacacatgagggcatgaggactagtgttctccctgtcgttcgttgacttgactagtgatagtttaaacgctcttcaactggaagagcggttactaccggttcactagctagctgctaatcgagctagttaccctatgaggtgacatgaagcgctcacggttactatgacggttagcttcacgactgttggtggcagtagcgtacgacttagctatagttccggacttacctagctagcggccgcgaattcctgcagggccctcttgtcggaccagttgcccaccacgttggtgagctccagcttttgttccctttagtgagggttaattaccgaattcgagctcggtaccctgggatccgatatcgatgggccctggccgaagctttgagagtacaatgatgaacctagattaatcaatgccaaagtctgaaaaatgcaccctcagtctatgatccagaaaatcaagattgcttgaggccctgttcggttgttccggattagagccccggattaattcctagccggattacttctctaatttatatagattttgatgagctggaatgaatcctggcttattccggtacaaccgaacaggccctgaaggataccagtaatcgctgagctaaattggcatgctgtcagagtgtcagtattgcagcaaggtagtgagataaccggcatcatggtgccagtttgatggcaccattagggttagagatggtggccatgggcgcatgtcctggccaactttgtatgatatatggcagggtgaataggaaagtaaaattgtattgtaaaaagggatttcttctgtttgttagcgcatgtacaaggaatgcaagttttgagcgagggggcatcaaagatctggctgtgtttccagctgtttttgttagccccatcgaatccttgacataatgatcccgcttaaataagcaacctcgcttgtatagttccttgtgctctaacacacgatgatgataagtcgtaaaatagtggtgtccaaagaatttccaggcccagttgtaaaagctaaaatgctattcgaatttctactagcagtaagtcgtgtttagaaattatttttttatataccttttttccttctatgtacagtaggacacagtgtcagcgccgcgttgacggagaatatttgcaaaaaagtaaaagagaaagtcatagcggcgtatgtgccaaaaacttcgtcacagagagggccataagaaacatggcccacggcccaatacgaagcaccgcgacgaagcccaaacagcagtccgtaggtggagcaaagcgctgggtaatacgcaaacgttttgtcccaccttgactaatcacaagagtggagcgtaccttataaaccgagccgcaagcaccgaattgcccaaaacgctttcccgatgttttagagctagaaatagcaagttaaaataaggctagtccgttatcaacttgaaaaagtggcaccgagtcggtgctttttttttgcggccgcgaattcctgcagggccctcttgtcggaccagttgcccaccacgttggtgaggggcacccagctttcttgtacaaagtggccgttaacggatcggccagaatggcccggaccgggttaccgaattcgagctcggtaccctgggatccgatatcgatgggccctggccgaagctttgagagtacaatgatgaacctagattaatcaatgccaaagtctgaaaaatgcaccctcagtctatgatccagaaaatcaagattgcttgaggccctgttcggttgttccggattagagccccggattaattcctagccggattacttctctaatttatatagattttgatgagctggaatgaatcctggcttattccggtacaaccgaacaggccctgaaggataccagtaatcgctgagctaaattggcatgctgtcagagtgtcagtattgcagcaaggtagtgagataaccggcatcatggtgccagtttgatggcaccattagggttagagatggtggccatgggcgcatgtcctggccaactttgtatgatatatggcagggtgaataggaaagtaaaattgtattgtaaaaagggatttcttctgtttgttagcgcatgtacaaggaatgcaagttttgagcgagggggcatcaaagatctggctgtgtttccagctgtttttgttagccccatcgaatccttgacataatgatcccgcttaaataagcaacctcgcttgtatagttccttgtgctctaacacacgatgatgataagtcgtaaaatagtggtgtccaaagaatttccaggcccagttgtaaaagctaaaatgctattcgaatttctactagcagtaagtcgtgtttagaaattatttttttatataccttttttccttctatgtacagtaggacacagtgtcagcgccgcgttgacggagaatatttgcaaaaaagtaaaagagaaagtcatagcggcgtatgtgccaaaaacttcgtcacagagagggccataagaaacatggcccacggcccaatacgaagcaccgcgacgaagcccaaacagcagtccgtaggtggagcaaagcgctgggtaatacgcaaacgttttgtcccaccttgactaatcacaagagtggagcgtaccttataaaccgagccgcaagcaccgaattgcaatataaaattaccgatgttttagagctagaaatagcaagttaaaataaggctagtccgttatcaacttgaaaaagtggcaccgagtcggtgctttttttttgcggccgcgaattcctgcagggccctcttgtcggaccagttgcctgagagtacaatgatgaacctagattaatcaatgccaaagtctgaaaaatgcaccctcagtctatgatccagaaaatcaagattgcttgaggccctgttcggttgttccggattagagccccggattaattcctagccggattacttctctaatttatatagattttgatgagctggaatgaatcctggcttattccggtacaaccgaacaggccctgaaggataccagtaatcgctgagctaaattggcatgctgtcagagtgtcagtattgcagcaaggtagtgagataaccggcatcatggtgccagtttgatggcaccattagggttagagatggtggccatgggcgcatgtcctggccaactttgtatgatatatggcagggtgaataggaaagtaaaattgtattgtaaaaagggatttcttctgtttgttagcgcatgtacaaggaatgcaagttttgagcgagggggcatcaaagatctggctgtgtttccagctgtttttgttagccccatcgaatccttgacataatgatcccgcttaaataagcaacctcgcttgtatagttccttgtgctctaacacacgatgatgataagtcgtaaaatagtggtgtccaaagaatttccaggcccagttgtaaaagctaaaatgctattcgaatttctactagcagtaagtcgtgtttagaaattatttttttatataccttttttccttctatgtacagtaggacacagtgtcagcgccgcgttgacggagaatatttgcaaaaaagtaaaagagaaagtcatagcggcgtatgtgccaaaaacttcgtcacagagagggccataagaaacatggcccacggcccaatacgaagcaccgcgacgaagcccaaacagcagtccgtaggtggagcaaagcgctgggtaatacgcaaacgttttgtcccaccttgactaatcacaagagtggagcgtaccttataaaccgagccgcaagcaccgaattgctcccccggccaccccctcgttttagagctagaaatagcaagttaaaataaggctagtccgttatcaacttgaaaaagtggcaccgagtcggtgctttttttttcaccacgttggtgagggggagctcggtaccgagctcgaattcattccgattaatcgtggcctcttgctcttcaggatgaagagctatgtttaaacgtgcagtgcagcgtgacccggtcgtgcccctctctagagataatgagcattgcatgtctaagttataaaaaattaccacatattttttttgtcacacttgtttgaagtgcagtttatctatctttatacatatatttaaactttactctacgaataatataatctatagtactacaataatatcagtgttttagagaatcatataaatgaacagttagacatggtctaaaggacaattgagtattttgacaacaggactctacagttttatctttttagtgtgcatgtgttctcctttttttttgcaaatagcttcacctatataatacttcatccattttattagtacatccatttagggtttagggttaatggtttttatagactaatttttttagtacatctattttattctattttagcctctaaattaagaaaactaaaactctattttagtttttttatttaataatttagatataaaatagaataaaataaagtgactaaaaattaaacaaataccctttaagaaattaaaaaaactaaggaaacatttttcttgtttcgagtagataatgccagcctgttaaacgccgtcgacgagtctaacggacaccaaccagcgaaccagcagcgtcgcgtcgggccaagcgaagcagacggcacggcatctctgtcgctgcctctggacccctctcgagagttccgctccaccgttggacttgctccgctgtcggcatccagaaattgcgtggcggagcggcagacgtgagccggcacggcaggcggcctcctcctcctctcacggcaccggcagctacgggggattcctttcccaccgctccttcgctttcccttcctcgcccgccgtaataaatagacaccccctccacaccctctttccccaacctcgtgttgttcggagcgcacacacacacaaccagatctcccccaaatccacccgtcggcacctccgcttcaaggtacgccgctcgtcctcccccccccccctctctaccttctctagatcggcgttccggtccatgcatggttagggcccggtagttctacttctgttcatgtttgtgttagatccgtgtttgtgttagatccgtgctgctagcgttcgtacacggatgcgacctgtacgtcagacacgttctgattgctaacttgccagtgtttctctttggggaatcctgggatggctctagccgttccgcagacgggatcgatttcatgattttttttgtttcgttgcatagggtttggtttgcccttttcctttatttcaatatatgccgtgcacttgtttgtcgggtcatcttttcatgcttttttttgtcttggttgtgatgatgtggtctggttgggcggtcgttctagatcggagtagaattctgtttcaaactacctggtggatttattaattttggatctgtatgtgtgtgccatacatattcatagttacgaattgaagatgatggatggaaatatcgatctaggataggtatacatgttgatgcgggttttactgatgcatatacagagatgctttttgttcgcttggttgtgatgatgtggtgtggttgggcggtcgttcattcgttctagatcggagtagaatactgtttcaaactacctggtgtatttattaattttggaactgtatgtgtgtgtcatacatcttcatagttacgagtttaagatggatggaaatatcgatctaggataggtatacatgttgatgtgggttttactgatgcatatacatgatggcatatgcagcatctattcatatgctctaaccttgagtacctatctattataataaacaagtatgttttataattattttgatcttgatatacttggatgatggcatatgcagcagctatatgtggatttttttagccctgccttcatacgctatttatttgcttggtactgtttcttttgtcgatgctcaccctgttgtttggtgttacttctgcaggtcgactttaacttagcctaggatccaccggtcgccaccatggcctcctccgagaacgtcatcaccgagttcatgcgcttcaaggtgcgcatggagggcaccgtgaacggccacgagttcgagatcgagggcgagggcgagggccgcccctacgagggccacaacaccgtgaagctgaaggtgacgaagggcggccccctgcccttcgcctgggacatcctgtccccccagttccagtacggctccaaggtgtacgtgaagcaccccgccgacatccccgactacaagaagctgtccttccccgagggcttcaagtgggagcgcgtgatgaacttcgaggacggcggcgtggcgaccgtgacccaggactcctccctgcaggacggctgcttcatctacaaggtgaagttcatcggcgtgaacttcccctccgacggccccgtgatgcagaagaagaccatgggctgggaggcctccaccgagcgcctgtacccccgcgacggcgtgctgaagggcgagacccacaaggccctgaagctgaaggacggcggccactacctggtggagttcaagtccatctacatggccaagaagcccgtgcagctgcccggctactactacgtggacgccaagctggacatcacctcccacaacgaggactacaccatcgtggagcagtacgagcgcaccgagggccgccaccacctgttcctgtagcggcccatggatattcgaacgcgtaggtaccacatggttaacctagacttgtccatcttctggattggccaacttaattaatgtatgaaataaaaggatgcacacatagtgacatgctaatcactataatgtgggcatcaaagttgtgtgttatgtgtaattactagttatctgaataaaagagaaagagatcatccatatttcttatcctaaatgaatgtcacgtgtctttataattctttgatgaaccagatgcatttcattaaccaaatccatatacatataaatattaatcatatataattaatatcaattgggttagcaaaacaaatctagtctaggtgtgttttgcagcgctactagacaattcagtacattaaaaacgtccgcaatgtgttattaagttgtctaagcgtcaatttgtttacaccacaatatatcctgcca

SEQ ID NO: 18 - DNA, 297 bp, Artificial sequence
  Synthetic
acctgcgccaaggacatccagaaagcagccgccgaagcggccctcgccttccaagacgagacgtgcgatacaaccaccacgaatcatggcctcgatatggaggaaacgatggtcgaagccatctacaccccagagcagtcagaaggcgccttctacatggacgaggaaaccatgttcggcatgccgaccctcctcgacaacatggccgaaggaatgctcctcccacctccctcagttcagtggaaccacaactacgacggcgaaggcgacggagacgtttccctgtggagctactag

SEQ ID NO: 19 - protein, 98 aa, Artificial sequence
  Synthetic
TCAKDIQKAAAEAALAFQDETCDTTTTNHGLDMEETMVEAIYTPEQSEGAFYMDEETMFGMPTLLDNMAEGMLLPPPSVQWNHNYDGEGDGDVSLWSY

SEQ ID NO: 20 - DNA, 6247 bp, Artificial sequence
  Synthetic
cccagtcttccgactgagcctttcgttttatttgatgcctggcagttccctactctcgcgttaacgctagcatggatgttttcccagtcacgacgttgtaaaacgacggccagtcttaagctcgggccctgcagctctagagctcgaattctacaggtcactaataccatctaagtagttggttcatagtgactgcatatgttgtgttttacagtattatgtagtctgttttttatgcaaaatctaatttaatatattgatatttatatcattttacgtttctcgttcaactttcttgtacaaagtggccgttaacggatcggccagaatggcccggaccgaagccgaggccggccacactgatagtttaaactgaaggcgggaaacgacaatctgatcatgagcggagaattaagggagtcacgttatgacccccgccgatgacgcgggacaagccgttttacgtttggaactgacagaaccgcaacgattgaaggagccactcagccgcgggtttctggagtttaatgagctaagcacatacgtcagaaaccattattgcgcgttcaaaagtcgcctaaggtcactatcagctagcaaatatttcttgtcaaaaatgctccactgacgttccataaattcccctcggtatccaattagagtctcatattcactctcccggcggatctcgactctagaggatcgctcaggaaggccgctgagatagagccatgggaagaagggcatgctgtgcgaaagaaggcgtgaagagaggcgcctggacaagcaaggaagacgacgcgctcgcagcatacgtgaaggctcacggagaaggaaagtggcgcgaggttccacagaaagctggacttcgcaggtgcggaaaaagctgtcgccttcgctggctcaactacctccgccctaacatacgccgcggcaacatcagctacgacgaggaggacctcattatccgcctccatagactcttggggaaccggtggagccttatagcaggacggctcccaggccgcaccgacaatgaaattaagaattactggaacagcacactcggcagaagggcaggcgctggagctggtgcgggaggaagatctacgatggcactgtcagcaagcagagtgcagcaagcagaggaactcctgcagaggccagcagaacgccagctcatgagatctcagcttgccgctgctgcaagaagcatcaactggtcctacgcgctcttctggagcatatcagacacccaaccaggagtcctgacatggactgacggcttctacaacggcgaggtcaagacccggaagatctcgaactccgtcgaactcacctccgatcagctcgtcatgcaaaggtccgaccaactgcgcgaactctacgaagccctcctgagcggagagggcgatagaagagcagctccagcaagaccggccggaagcctcagcccagaggacttgggagatacggaatggtactacgtcgtctctatgacatacgcattcaggcctgggcagggactcccgggtagatcctttgcaagcgacgaacacgtgtggctgtgcaacgcacacctcgcaggcagcaaggcatttcctagggccctcttggcaaagtcggccagcatccagtccatcctctgcattccagttatgggcggcgtcctcgagctgggaaccacagatacagtgccagaagcacccgacttggtgtccagagcaaccgcagccttttgggaaccacagtgcccatcatcctcaccctcaggccgcgctaatgaaacaggagaggcagcagctgacgatggaacattcgcgttcgaggagctggaccacaataatggaatggacgatatagaagcaatgacggcggctggcggacatggtcaggaggaggagcttagacttcgggaagccgaggcacttagcgacgacgctagccttgagcatataaccaaggagattgaggagttctacagcctgtgcgacgagatggacctccaagcactcccactccctctagaagacggctggactgtggatgctagcaacttcgaggtcccctgttccagcccccaaccagccccacctccagtcgacagggctacagccaatgtggcagcagatgcctctcgcgccccagtctacggctccagggcaacttccttcatggcctggacccgctcgtctcaacaatcgtcctgctccgacgacgcagcccccgctgcagtcgttccagcaatagaagaaccgcagcgcctgctcaaaaaggtggtcgctggaggcggagcatgggaaagctgcggcggcgcaacaggtgcggcgcaagaaatgagcggaacaggcacgaagaaccacgtcatgtccgaaaggaaacgccgcgaaaagctgaacgagatgttcctggtcctcaaatcccttctgcccagcatccacagggtgaacaaggcctcgatcctcgcagagacgatcgcttacctcaaagagcttcaacgccgggttcaagagctcgagagctcaagggagccagcctccagaccatccgaaactacaacacgcctcataaccaggcccagccgcgggaataatgagtccgtgagaaaagaggtctgcgcaggctccaaacgcaaatccccggaactcggcagagatgatgtggaacggcccccagtcctcacaatggacgccggtactagcaacgtcaccgtgacagtcagcgacaaagacgtgctgctggaggtgcaatgcaggtgggaggagttgctgatgacacgcgtgttcgacgccatcaaaagcctccacctcgacgtcctgagcgtccaagcctctgcacctgatggatttatgggcctcaagatccgggcacaattcgccggatcgggggcggtcgtcccctggatgatctctgaggcactccgcaaggcaattgggaacccctgggtcgttgttgctccggatacaggatcgcacgcaacaccggcagcaaccagcggtgcgtgtgaaactggacaaaacagcgctgcccacagagcagaccctgattcggctggtacaacaactacatccgccgcagctgtgtgggcaccgaaggctgtcagatgtacaggcgggctgttcttcttccacagagacacaacacctgctcacgcgggagaaacagcgacccctatggctggtggaggaggtggtggaggcggtgaagcagggtcctccgatgattgcagctcagcagcatccgtttccctcagagtcggttcgcacgacgaaccatgcttctcaggagatggtgacggggactggatggacgacgttagggctctcgcatcattcctggagtcggacgaagactggctccgctgccaaaccgctggtcaacttgcctagcgtaccactaactatctatactgtaataatgttgtatagccgccggatagctagctagtttagtcattcagcggcgatgggtaataataaagtgtcatccatccatcaccatgcgtggcaacgtgagcaatgacctgattgaacaaattgaaatgaaaagaagaaatatgttatatgtcaacgagatttcctcataatgccactgacgacgtgtgtccaagaaatgtatcagtgatacgtatattcacaatttttttatgacttatactcacaatttgtttttttactacttatactcacaatttgttgtgcgtaccataacaatttcgatcgaatatatatcagaaagttgacgaaagtaagctcactcaaaaagttaaatgggctgcggaagctgcgtcaggcccaagttttggctattctatccggtatccacgattttgatggctgagggacatatgttcgcttaagcttggcgcgccggtcacccggtccgggcctagaaggccagcttcggccgccccgggcaactttattatacaaagttggcattataaaaaagcattgcttatcaatttgttgcaacgaacaggtcactatcagtcaaaataaaatcattatttggagctccatggtagcgttaacgcggccgcgatatcccctatagtgagtcgtattacatggtcatagctgtttcctggcagctctggcccgtgtctcaaaatctctgatgttacattgcacaagataaaaatatatcatcatgaacaataaaactgtctgcttacataaacagtaatacaaggggtgttatgagccatattcaacgggaaacgtcgaggccgcgattaaattccaacatggatgctgatttatatgggtataaatgggctcgcgataatgtcgggcaatcaggtgcgacaatctatcgcttgtatgggaagcccgatgcgccagagttgtttctgaaacatggcaaaggtagcgttgccaatgatgttacagatgagatggtcagactaaactggctgacggaatttatgcctcttccgaccatcaagcattttatccgtactcctgatgatgcatggttactcaccactgcgatccccggaaaaacagcattccaggtattagaagaatatcctgattcaggtgaaaatattgttgatgcgctggcagtgttcctgcgccggttgcattcgattcctgtttgtaattgtccttttaacagcgatcgcgtatttcgtctcgctcaggcgcaatcacgaatgaataacggtttggttgatgcgagtgattttgatgacgagcgtaatggctggcctgttgaacaagtctggaaagaaatgcataaacttttgccattctcaccggattcagtcgtcactcatggtgatttctcacttgataaccttatttttgacgaggggaaattaataggttgtattgatgttggacgagtcggaatcgcagaccgataccaggatcttgccatcctatggaactgcctcggtgagttttctccttcattacagaaacggctttttcaaaaatatggtattgataatcctgatatgaataaattgcagtttcatttgatgctcgatgagtttttctaatcagaattggttaattggttgtaacactggcagagcattacgctgacttgacgggacggcgcaagctcatgaccaaaatcccttaacgtgagttacgcgtcgttccactgagcgtcagaccccgtagaaaagatcaaaggatcttcttgagatcctttttttctgcgcgtaatctgctgcttgcaaacaaaaaaaccaccgctaccagcggtggtttgtttgccggatcaagagctaccaactctttttccgaaggtaactggcttcagcagagcgcagataccaaatactgttcttctagtgtagccgtagttaggccaccacttcaagaactctgtagcaccgcctacatacctcgctctgctaatcctgttaccagtggctgctgccagtggcgataagtcgtgtcttaccgggttggactcaagacgatagttaccggataaggcgcagcggtcgggctgaacggggggttcgtgcacacagcccagcttggagcgaacgacctacaccgaactgagatacctacagcgtgagctatgagaaagcgccacgcttcccgaagggagaaaggcggacaggtatccggtaagcggcagggtcggaacaggagagcgcacgagggagcttccagggggaaacgcctggtatctttatagtcctgtcgggtttcgccacctctgacttgagcgtcgatttttgtgatgctcgtcaggggggcggagcctatggaaaaacgccagcaacgcggcctttttacggttcctggccttttgctggccttttgctcacatgttctttcctgcgttatcccctgattctgtggataaccgtattaccgcctttgagtgagctgataccgctcgccgcagccgaacgaccgagcgcagcgagtcagtgagcgaggaagcggaagagcgcccaatacgcaaaccgcctctccccgcgcgttggccgattcattaatgcagctggcacgacaggtttcccgactggaaagcgggcagtgagcgcaacgcaattaatacgcgtaccgctagccaggaagagtttgtagaaacgcaaaaaggccatccgtcaggatggccttctgcttagtttgatgcctggcagtttatggcgggcgtcctgcccgccaccctccgggccgttgcttcacaacgttcaaatccgctcccggcggatttgtcctactcaggagagcgttcaccgacaaacaacagataaaacgaaagg

SEQ ID NO: 21 - DNA, 5451 bp, Artificial sequence
  Synthetic
tcgcgcgtttcggtgatgacggtgaaaacctctgacacatgcagctcccggagacggtcacagcttgtctgtaagcggatgccgggagcagacaagcccgtcagggcgcgtcagcgggtgttggcgggtgtcggggctggcttaactatgcggcatcagagcagattgtactgagagtgcaccatatgcggtgtgaaataccgcacagatgcgtaaggagaaaataccgcatcaggcgccattcgccattcaggctgcgcaactgttgggaagggcgatcggtgcgggcctcttcgctattacgccagctggcgaaagggggatgtgctgcaaggcgattaagttgggtaacgccagggttttcccagtcacgacgttgtaaaacgacggccagtgccaagctcagatctgagcttctagaaatccgtcaacatggtggagcacgacactctcgtctactccaagaatatcaaagatacagtctcagaagaccaaagggctattgagacttttcaacaaagggtaatatcgggaaacctcctcggattccattgcccagctatctgtcacttcatcaaaaggacagtagaaaaggaaggtggcacctacaaatgccatcattgcgataaaggaaaggctatcgttcaagatgcctctgccgacagtggtcccaaagatggacccccacccacgaggagcatcgtggaaaaagaagacgttccaaccacgtcttcaaagcaagtggattgatgtgatgctctagaaatccgtcaacatggtggagcacgacactctcgtctactccaagaatatcaaagatacagtctcagaagaccaaagggctattgagacttttcaacaaagggtaatatcgggaaacctcctcggattccattgcccagctatctgtcacttcatcaaaaggacagtagaaaaggaaggtggcacctacaaatgccatcattgcgataaaggaaaggctatcgttcaagatgcctctgccgacagtggtcccaaagatggacccccacccacgaggagcatcgtggaaaaagaagacgttccaaccacgtcttcaaagcaagtggattgatgtgatatctccactgacgtaagggatgacgcacaatcccactatccttcgcaagacccttcctctatataaggaagttcatttcatttggagaggacgagctgcagcttatttttacaacaattaccaacaacaacaaacaacaaacaacattacaattactatttacaattacagtcgacggatcaagtgcaaaggtccgccttgtttctcctctgtctcttgatctgactaatcttggtttatgattcgttgagtaattttggggaaagcttcgtccacagtttttttttcgatgaacagtgccgcagtggcgctgatcttgtatgctatcctgcaatcgtggtgaacttatgtcttttatatccttcactaccatgaaaagactagtaatctttctcgatgtaacatcgtccagcactgctattaccgtgtggtccatccgacagtctggctgaacacatcatacgatattgagcaaagatcgatctatcttccctgttctttaatgaaagacgtcattttcatcagtatgatctaagaatgttgcaacttgcaaggaggcgtttctttctttgaatttaactaactcgttgagtggccctgtttctcggacgtaaggcctttgctgctccacacatgtccattcgaattttaccgtgtttagcaagggcgaaaagtttgcatcttgatgatttagcttgactatgcgattgctttcctggacccgtgcagctgcggacggatccccgggtaccgagctcgaattccgcgcgatggggaggagggcgtgttgcgcgaaggaaggcgttaagagaggggcgtggacgagcaaggaggacgatgccttggccgcctacgtcaaggcccatggcgaaggcaaatggagggaagtgccccagaaagccggtttgcgtcggtgcggcaagagctgccggctgcggtggctgaactacctccggcccaacatcaggcgcggcaacatctcctacgacgaggaggatctcatcatccgcctccacaggctcctcggcaacaggtggtcgctgattgcaggcaggctgcctggccgaacagacaatgaaatcaagaactactggaacagcacgctgggccggagggcaggcgccggcgccggcgccggcggcagctgggtcgtcgtcgcgccggacaccggctcgcacgccaccccggccgcgacgtcgggcgcctgcgagaccggccagaatagcgccgctcatcgcgcggaccccgactcagccgggacgacgacgacctcggcggcggcggtgtgggcgcccaaggccgtgcggtgcacgggcggactcttcttcttccaccgggacacgacgccggcgcacgcgggcgagacggcgacgccaatggccggtggaggtggaggaggaggaggagaagcagggtcgtcggacgactgcagctcggcggcgtcggtatcgcttcgcgtcggaagccacgacgagccgtgcttctccggcgacggtgacggcgactggatggacgacgtgagggccctggcgtcgtttctcgagtccgacgaggactggctccgctgtcagacggccgggcagcttgcgtagacaacaagtacacgtatagatgtccaataagcacgaggcccgcgagcccggcacgaagcccgctttttgggcccggtccgagcccggcacggcccggttatatgcagacccgggccggcccggcacgaataagcgggccgggctcggacaggaaattaggcacggtgagctagaggatccaccatggttaacctagacttgtccatcttctggattggccaacttaattaatgtatgaaataaaaggatgcacacatagtgacatgctaatcactataatgtgggcatcaaagttgtgtgttatgtgtaattactagttatctgaataaaagagaaagagatcatccatatttcttatcctaaatgaatgtcacgtgtctttataattctttgatgaaccagatgcatttcattaaccaaatccatatacatataaatattaatcatatataattaatatcaattgggttagcaaaacaaatctagtctaggtgtgttttgcgaattgcggccgcgatctggggaattcgtaatcatggtcatagctgtttcctgtgtgaaattgttatccgctcacaattccacacaacatacgagccggaagcataaagtgtaaagcctggggtgcctaatgagtgagctaactcacattaattgcgttgcgctcactgcccgctttccagtcgggaaacctgtcgtgccagctgcattaatgaatcggccaacgcgcggggagaggcggtttgcgtattgggcgctcttccgcttcctcgctcactgactcgctgcgctcggtcgttcggctgcggcgagcggtatcagctcactcaaaggcggtaatacggttatccacagaatcaggggataacgcaggaaagaacatgtgagcaaaaggccagcaaaaggccaggaaccgtaaaaaggccgcgttgctggcgtttttccataggctccgcccccctgacgagcatcacaaaaatcgacgctcaagtcagaggtggcgaaacccgacaggactataaagataccaggcgtttccccctggaagctccctcgtgcgctctcctgttccgaccctgccgcttaccggatacctgtccgcctttctcccttcgggaagcgtggcgctttctcatagctcacgctgtaggtatctcagttcggtgtaggtcgttcgctccaagctgggctgtgtgcacgaaccccccgttcagcccgaccgctgcgccttatccggtaactatcgtcttgagtccaacccggtaagacacgacttatcgccactggcagcagccactggtaacaggattagcagagcgaggtatgtaggcggtgctacagagttcttgaagtggtggcctaactacggctacactagaaggacagtatttggtatctgcgctctgctgaagccagttaccttcggaaaaagagttggtagctcttgatccggcaaacaaaccaccgctggtagcggtggtttttttgtttgcaagcagcagattacgcgcagaaaaaaaggatctcaagaagatcctttgatcttttctacggggtctgacgctcagtggaacgaaaactcacgttaagggattttggtcatgagattatcaaaaaggatcttcacctagatccttttaaattaaaaatgaagttttaaatcaatctaaagtatatatgagtaaacttggtctgacagttaccaatgcttaatcagtgaggcacctatctcagcgatctgtctatttcgttcatccatagttgcctgactccccgtcgtgtagataactacgatacgggagggcttaccatctggccccagtgctgcaatgataccgcgagacccacgctcaccggctccagatttatcagcaataaaccagccagccggaagggccgagcgcagaagtggtcctgcaactttatccgcctccatccagtctattaattgttgccgggaagctagagtaagtagttcgccagttaatagtttgcgcaacgttgttgccattgctacaggcatcgtggtgtcacgctcgtcgtttggtatggcttcattcagctccggttcccaacgatcaaggcgagttacatgatcccccatgttgtgcaaaaaagcggttagctccttcggtcctccgatcgttgtcagaagtaagttggccgcagtgttatcactcatggttatggcagcactgcataattctcttactgtcatgccatccgtaagatgcttttctgtgactggtgagtactcaaccaagtcattctgagaatagtgtatgcggcgaccgagttgctcttgcccggcgtcaatacgggataataccgcgccacatagcagaactttaaaagtgctcatcattggaaaacgttcttcggggcgaaaactctcaaggatcttaccgctgttgagatccagttcgatgtaacccactcgtgcacccaactgatcttcagcatcttttactttcaccagcgtttctgggtgagcaaaaacaggaaggcaaaatgccgcaaaaaagggaataagggcgacacggaaatgttgaatactcatactcttcctttttcaatattattgaagcatttatcagggttattgtctcatgagcggatacatatttgaatgtatttagaaaaataaacaaataggggttccgcgcacatttccccgaaaagtgccacctgacgtctaagaaaccattattatcatgacattaacctataaaaataggcgtatcacgaggccctttcgtc

SEQ ID NO: 22 - DNA, 10333 bp, Artificial sequence
  Synthetic
aggctgcgcaactgttgggaagggcgatcggtgcgggcctcttcgctattacgccagctggcgaaagggggatgtgctgcaaggcgattaagttgggtaacgccagggttttcccagtcacgacgttgtaaaacgacggccagtgaattgtaatacgactcactatagggcgaattgggttacccggaccgaagcttgcatgcctgcagtgcagcgtgacccggtcgtgcccctctctagagataatgagcattgcatgtctaagttataaaaaattaccacatattttttttgtcacacttgtttgaagtgcagtttatctatctttatacatatatttaaactttactctacgaataatataatctatagtactacaataatatcagtgttttagagaatcatataaatgaacagttagacatggtctaaaggacaattgagtattttgacaacaggactctacagttttatctttttagtgtgcatgtgttctcctttttttttgcaaatagcttcacctatataatacttcatccattttattagtacatccatttagggtttagggttaatggtttttatagactaatttttttagtacatctattttattctattttagcctctaaattaagaaaactaaaactctattttagtttttttatttaataatttagatataaaatagaataaaataaagtgactaaaaattaaacaaataccctttaagaaattaaaaaaactaaggaaacatttttcttgtttcgagtagataatgccagcctgttaaacgccgtcgacgagtctaacggacaccaaccagcgaaccagcagcgtcgcgtcgggccaagcgaagcagacggcacggcatctctgtcgctgcctctggacccctctcgagagttccgctccaccgttggacttgctccgctgtcggcatccagaaattgcgtggcggagcggcagacgtgagccggcacggcaggcggcctcctcctcctctcacggcaccggcagctacgggggattcctttcccaccgctccttcgctttcccttcctcgcccgccgtaataaatagacaccccctccacaccctctttccccaacctcgtgttgttcggagcgcacacacacacaaccagatctcccccaaatccacccgtcggcacctccgcttcaaggtacgccgctcgtcctcccccccccccctctctaccttctctagatcggcgttccggtccatgcatggttagggcccggtagttctacttctgttcatgtttgtgttagatccgtgtttgtgttagatccgtgctgctagcgttcgtacacggatgcgacctgtacgtcagacacgttctgattgctaacttgccagtgtttctctttggggaatcctgggatggctctagccgttccgcagacgggatcgatttcatgattttttttgtttcgttgcatagggtttggtttgcccttttcctttatttcaatatatgccgtgcacttgtttgtcgggtcatcttttcatgcttttttttgtcttggttgtgatgatgtggtctggttgggcggtcgttctagatcggagtagaattctgtttcaaactacctggtggatttattaattttggatctgtatgtgtgtgccatacatattcatagttacgaattgaagatgatggatggaaatatcgatctaggataggtatacatgttgatgcgggttttactgatgcatatacagagatgctttttgttcgcttggttgtgatgatgtggtgtggttgggcggtcgttcattcgttctagatcggagtagaatactgtttcaaactacctggtgtatttattaattttggaactgtatgtgtgtgtcatacatcttcatagttacgagtttaagatggatggaaatatcgatctaggataggtatacatgttgatgtgggttttactgatgcatatacatgatggcatatgcagcatctattcatatgctctaaccttgagtacctatctattataataaacaagtatgttttataattattttgatcttgatatacttggatgatggcatatgcagcagctatatgtggatttttttagccctgccttcatacgctatttatttgcttggtactgtttcttttgtcgatgctcaccctgttgtttggtgttacttctgcaggtcgactctagaggatccatggcaccgaagaagaagcgcaaggtgatggacaagaagtacagcatcggcctcgccatcggcaccaactcggtgggctgggccgtcatcacggacgaatataaggtcccgtcgaagaagttcaaggtcctcggcaatacagaccgccacagcatcaagaaaaacttgatcggcgccctcctgttcgatagcggcgagaccgcggaggcgaccaggctcaagaggaccgccaggagacggtacactaggcgcaagaacaggatctgctacctgcaggagatcttcagcaacgagatggcgaaggtggacgactccttcttccaccgcctggaggaatcattcctggtggaggaggacaagaagcatgagcggcacccaatcttcggcaacatcgtcgacgaggtaagtttctgcttctacctttgatatatatataataattatcattaattagtagtaatataatatttcaaatatttttttcaaaataaaagaatgtagtatatagcaattgcttttctgtagtttataagtgtgtatattttaatttataacttttctaatatatgaccaaaacatggtgatgtgcaggtggcctaccacgagaagtacccgacaatctaccacctccggaagaaactggtggacagcacagacaaggcggacctccggctcatctaccttgccctcgcgcatatgatcaagttccgcggccacttcctcatcgagggcgacctgaacccggacaactccgacgtggacaagctgttcatccagctcgtgcagacgtacaatcaactgttcgaggagaaccccataaacgctagcggcgtggacgccaaggccatcctctcggccaggctctcgaaatcaagaaggctggagaaccttatcgcgcagttgccaggcgaaaagaagaacggcctcttcggcaaccttattgcgctcagcctcggcctgacgccgaacttcaaatcaaacttcgacctcgcggaggacgccaagctccagctctcaaaggacacctacgacgacgacctcgacaacctcctggcccagataggagaccagtacgcggacctcttcctcgccgccaagaacctctccgacgctatcctgctcagcgacatccttcgggtcaacaccgaaattaccaaggcaccgctgtccgccagcatgattaaacgctacgacgagcaccatcaggacctcacgctgctcaaggcactcgtccgccagcagctccccgagaagtacaaggagatcttcttcgaccaatcaaaaaacggctacgcgggatatatcgacggcggtgccagccaggaagagttctacaagttcatcaaaccaatcctggagaagatggacggcaccgaggagttgctggtcaagctcaacagggaggacctcctcaggaagcagaggaccttcgacaacggctccatcccgcatcagatccacctgggcgaactgcatgccatcctgcggcgccaggaggacttctacccgttcctgaaggataaccgggagaagatcgagaagatcttgacgttccgcatcccatactacgtgggcccgctggctcgcggcaactcccggttcgcctggatgacccggaagtcggaggagaccatcacaccctggaactttgaggaggtggtcgataagggcgctagcgctcagagcttcatcgagcgcatgaccaacttcgataaaaacctgcccaatgaaaaagtcctccccaagcactcgctgctctacgagtacttcaccgtgtacaacgagctcaccaaggtcaaatacgtcaccgagggcatgcggaagccggcgttcctgagcggcgagcagaagaaggcgatagtggacctcctcttcaagaccaacaggaaggtgaccgtgaagcaattaaaagaggactacttcaagaaaatagagtgcttcgactccgtggagatctcgggcgtggaggatcggttcaacgcctcactcggcacgtatcacgacctcctcaagatcattaaagacaaggacttcctcgacaacgaggagaacgaggacatcctcgaggacatcgtcctcaccctgaccctgttcgaggaccgcgaaatgatcgaggagaggctgaagacctacgcgcacctgttcgacgacaaggtcatgaaacagctcaagaggcgccgctacactggttggggaaggctgtcccgcaagctcattaatggcatcagggacaagcagagcggcaagaccatcctggacttcctcaagtccgacgggttcgccaaccgcaacttcatgcagctcattcacgacgactcgctcacgttcaaggaagacatccagaaggcacaggtgagcgggcagggtgactccctccacgaacacatcgccaacctggccggctcgccggccattaaaaagggcatcctgcagacggtcaaggtcgtcgacgagctcgtgaaggtgatgggccggcacaagcccgaaaatatcgtcatagagatggccagggagaaccagaccacccaaaaagggcagaagaactcgcgcgagcggatgaaacggatcgaggagggcattaaagagctcgggtcccagatcctgaaggagcaccccgtggaaaatacccagctccagaatgaaaagctctacctctactacctgcagaacggccgcgacatgtacgtggaccaggagctggacattaatcggctatcggactacgacgtcgacgccatcgtgccgcagtcgttcctcaaggacgatagcatcgacaacaaggtgctcacccggtcggataaaaatcggggcaagagcgacaacgtgcccagcgaggaggtcgtgaagaagatgaaaaactactggcgccagctcctcaacgcgaaactgatcacccagcgcaagttcgacaacctgacgaaggcggaacgcggtggcttgagcgaactcgataaggcgggcttcataaaaaggcagctggtcgagacgcgccagatcacgaagcatgtcgcccagatcctggacagccgcatgaatactaagtacgatgaaaacgacaagctgatccgggaggtgaaggtgatcacgctgaagtccaagctcgtgtcggacttccgcaaggacttccagttctacaaggtccgcgagatcaacaactaccaccacgcccacgacgcctacctgaatgcggtggtcgggaccgccctgatcaagaagtacccgaagctggagtcggagttcgtgtacggcgactacaaggtctacgacgtgcgcaaaatgatcgccaagtccgagcaggagatcggcaaggccacggcaaaatacttcttctactcgaacatcatgaacttcttcaagaccgagatcaccctcgcgaacggcgagatccgcaagcgcccgctcatcgaaaccaacggcgagacgggcgagatcgtctgggataagggccgggatttcgcgacggtccgcaaggtgctctccatgccgcaagtcaatatcgtgaaaaagacggaggtccagacgggcgggttcagcaaggagtccatcctcccgaagcgcaactccgacaagctcatcgcgaggaagaaggattgggacccgaaaaaatatggcggcttcgacagcccgaccgtcgcatacagcgtcctcgtcgtggcgaaggtggagaagggcaagtcaaagaagctcaagtccgtgaaggagctgctcgggatcacgattatggagcggtcctccttcgagaagaacccgatcgacttcctagaggccaagggatataaggaggtcaagaaggacctgattattaaactgccgaagtactcgctcttcgagctggaaaacggccgcaagaggatgctcgcctccgcaggcgagttgcagaagggcaacgagctcgccctcccgagcaaatacgtcaatttcctgtacctcgctagccactatgaaaagctcaagggcagcccggaggacaacgagcagaagcagctcttcgtggagcagcacaagcattacctggacgagatcatcgagcagatcagcgagttctcgaagcgggtgatcctcgccgacgcgaacctggacaaggtgctgtcggcatataacaagcaccgcgacaaaccaatacgcgagcaggccgaaaatatcatccacctcttcaccctcaccaacctcggcgctccggcagccttcaagtacttcgacaccacgattgaccggaagcggtacacgagcacgaaggaggtgctcgatgcgacgctgatccaccagagcatcacagggctctatgaaacacgcatcgacctgagccagctgggcggagacaagagaccacgggaccgccacgatggcgagctgggaggccgcaagcgggcaaggggcagggctacgtgcgccaaggacatccaaaaagcagccgcggaggcggcactcgcctttcaggacgagacctgcgacaccaccaccaccaaccacggcctcgacatggaggagaccatggtcgaagccatctacacccccgagcagagcgagggcgccttctacatggacgaagagacaatgttcggcatgccaaccctcctcgacaacatggccgaaggcatgctgctgccgcccccgagcgtccagtggaaccacaactacgacggcgaaggcgacggggatgtgtccctgtggagctactaggtaccgttaacctagacttgtccatcttctggattggccaacttaattaatgtatgaaataaaaggatgcacacatagtgacatgctaatcactataatgtgggcatcaaagttgtgtgttatgtgtaattactagttatctgaataaaagagaaagagatcatccatatttcttatcctaaatgaatgtcacgtgtctttataattctttgatgaaccagatgcatttcattaaccaaatccatatacatataaatattaatcatatataattaatatcaattgggttagcaaaacaaatctagtctaggtgtgttttgcgaatgcggccgccaccgcggtggagctcgaattccggtccgggtcacccagcttgagtattctatagtgtcacctaaatagcttggcgtaatcatggtcatagctgtttcctgtgtgaaattgttatccgctcacaattccacacaacatacgagccggaagcataaagtgtaaagcctggggtgcctaatgagtgagctaactcacattaattgcgttgcgctcactgcccgctttccagtcgggaaacctgtcgtgccagctgcattaatgaatcggccaacgcgcggggagaggcggtttgcgtattgggcgctcttccgcttcctcgctcactgactcgctgcgctcggtcgttcggctgcggcgagcggtatcagctcactcaaaggcggtaatacggttatccacagaatcaggggataacgcaggaaagaacatgtgagcaaaaggccagcaaaaggccaggaaccgtaaaaaggccgcgttgctggcgtttttcgataggctccgcccccctgacgagcatcacaaaaatcgacgctcaagtcagaggtggcgaaacccgacaggactataaagataccaggcgtttccccctggaagctccctcgtgcgctctcctgttccgaccctgccgcttaccggatacctgtccgcctttctcccttcgggaagcgtggcgctttctcatagctcacgctgtaggtatctcagttcggtgtaggtcgttcgctccaagctgggctgtgtgcacgaaccccccgttcagcccgaccgctgcgccttatccggtaactatcgtcttgagtccaacccggtaagacacgacttatcgccactggcagcagccactggtaacaggattagcagagcgaggtatgtaggcggtgctacagagttcttgaagtggtggcctaactacggctacactagaaggacagtatttggtatctgcgctctgctgaagccagttaccttcggaaaaagagttggtagctcttgatccggcaaacaaaccaccgctggtagcggtggtttttttgtttgcaagcagcagattacgcgcagaaaaaaaggatctcaagaagatcctttgatcttttctacggggtctgacgctcagtggaacgaaaactcacgttaagggattttggtcatggagccacgttgtgtctcaaaatctctgatgttacattgcacaagataaaaatatatcatcatgaacaataaaactgtctgcttacataaacagtaatacaaggggtgttatgagccatattcaacgggaaacgtcttgctcgaggccgcgattaaattccaacatggatgctgatttatatgggtataaatgggctcgcgataatgtcgggcaatcaggtgcgacaatctatcgattgtatgggaagcccgatgcgccagagttgtttctgaaacatggcaaaggtagcgttgccaatgatgttacagatgagatggtcagactaaactggctgacggaatttatgcctcttccgaccatcaagcattttatccgtactcctgatgatgcatggttactcaccactgcgatccccggaaaaacagcattccaggtattagaagaatatcctgattcaggtgaaaatattgttgatgcgctggcagtgttcctgcgccggttgcattcgattcctgtttgtaattgtccttttaacagcgatcgcgtatttcgtctcgctcaggcgcaatcacgaatgaataacggtttggttgatgcgagtgattttgatgacgagcgtaatggctggcctgttgaacaagtctggaaagaaatgcataaacttttgccattctcaccggattcagtcgtcactcatggtgatttctcacttgataaccttatttttgacgaggggaaattaataggttgtattgatgttggacgagtcggaatcgcagaccgataccaggatcttgccatcctatggaactgcctcggtgagttttctccttcattacagaaacggctttttcagaaatatggtattgataatcctgatatgaataaattgcagtttcatttgatgctcgatgagtttttctaatcagaattggttaattggttgtaacactggcagagcattacgctgacttgacgggacggcggctttgttgaataaatcgaacttttgctgacttgaaggatcagatcacgcatcttcccgacaacgcagaccgttccgtggcaaagcaaaagttcaaaatcaccaactggtccacctacaacaaagctctcatcaaccgtggctccctcactttctggctggatgatggggcgattcaggcctggtatgagtcagcaacaccttcttcacgagccatgacattaacctataaaaataggcgtatcacgaggccctttcgtctcgcgcgtttcggtgatgacggtgaaaacctctgacacatgcagctcccggagacggtcacagcttgtctgtaagcggatgccgggagcagacaagcccgtcagggcgcgtcagcgggtgttggcgggtgtcggggctggcttaactatgcggcatcagagcagattgtactgagagtgcaccatatgcggtgtgaaataccgcacagatgcgtaaggagaaaataccgcatcaggcgaaattgtaaacgttaatattttgttaaaattcgcgttaaatatttgttaaatcagctcattttttaaccaataggccgaaatcggcaaaatcccttataaatcaaaagaatagaccgagatagggttgagtgttgttccagtttggaacaagagtccactattaaagaacgtggactccaacgtcaaagggcgaaaaaccgtctatcagggcgatggcccactacgtgaaccatcacccaaatcaagttttttgcggtcgaggtgccgtaaagctctaaatcggaaccctaaagggagcccccgatttagagcttgacggggaaagccggcgaacgtggcgagaaaggaagggaagaaagcgaaaggagcgggcgctagggcgctggcaagtgtagcggtcacgctgcgcgtaaccaccacacccgccgcgcttaatgcgccgctacagggcgcgtccattcgccattc

SEQ ID NO: 23 - DNA, 4440 bp, Artificial sequence
  Synthetic
tcacgacgttgtaaaacgacggccagtgaattgtaatacgactcactatagggcgaattgggtaccgggccccccctcgaggtcgacggtatcgataagctttgagagtacaatgatgaacctagattaatcaatgccaaagtctgaaaaatgcaccctcagtctatgatccagaaaatcaagattgcttgaggccctgttcggttgttccggattagagccccggattaattcctagccggattacttctctaatttatatagattttgatgagctggaatgaatcctggcttattccggtacaaccgaacaggccctgaaggataccagtaatcgctgagctaaattggcatgctgtcagagtgtcagtattgcagcaaggtagtgagataaccggcatcatggtgccagtttgatggcaccattagggttagagatggtggccatgggcgcatgtcctggccaactttgtatgatatatggcagggtgaataggaaagtaaaattgtattgtaaaaagggatttcttctgtttgttagcgcatgtacaaggaatgcaagttttgagcgagggggcatcaaagatctggctgtgtttccagctgtttttgttagccccatcgaatccttgacataatgatcccgcttaaataagcaacctcgcttgtatagttccttgtgctctaacacacgatgatgataagtcgtaaaatagtggtgtccaaagaatttccaggcccagttgtaaaagctaaaatgctattcgaatttctactagcagtaagtcgtgtttagaaattatttttttatataccttttttccttctatgtacagtaggacacagtgtcagcgccgcgttgacggagaatatttgcaaaaaagtaaaagagaaagtcatagcggcgtatgtgccaaaaacttcgtcacagagagggccataagaaacatggcccacggcccaatacgaagcaccgcgacgaagcccaaacagcagtccgtaggtggagcaaagcgctgggtaatacgcaaacgttttgtcccaccttgactaatcacaagagtggagcgtaccttataaaccgagccgcaagcaccgaattgagctccaccaaagacaaaggttttagagctagaaatagcaagttaaaataaggctagtccgttatcaacttgaaaaagtggcaccgagtcggtgctttttttttgcggccgcgaattcctgcagggccctcttgtcggaccagttgcccaccacgttggtgagctcggtgaggcccttcattgagaggaaggaggtcatgaggtgcctaccgatgtgggacttggggccgttcttgatggcgaagatggagtagggggcgttcttcttgagggccttgttgtaggacctcacgaggttgtccttgaggagctggtactcctgcttgttggaggaggagttgccggtcctgttcaccctcttgagcacgggctctgagttcctgaggaactcgtcgaggtacacgagggggtcgatcctgccgcgagcggagaagaagtagatgtgcctggacacggaggtcttggtctcggtcacgaggcactggatgatcacgccgaggtacttgttctgactagttctagagcggccgccaccgcggtggagctccagcttttgttccctttagtgagggttaatttcgagcttggcgtaatcatggtcatagctgtttcctgtgtgaaattgttatccgctcacaattccacacaacatacgagccggaagcataaagtgtaaagcctggggtgcctaatgagtgagctaactcacattaattgcgttgcgctcactgcccgctttccagtcgggaaacctgtcgtgccagctgcattaatgaatcggccaacgcgcggggagaggcggtttgcgtattgggcgctcttccgcttcctcgctcactgactcgctgcgctcggtcgttcggctgcggcgagcggtatcagctcactcaaaggcggtaatacggttatccacagaatcaggggataacgcaggaaagaacatgtgagcaaaaggccagcaaaaggccaggaaccgtaaaaaggccgcgttgctggcgtttttccataggctccgcccccctgacgagcatcacaaaaatcgacgctcaagtcagaggtggcgaaacccgacaggactataaagataccaggcgtttccccctggaagctccctcgtgcgctctcctgttccgaccctgccgcttaccggatacctgtccgcctttctcccttcgggaagcgtggcgctttctcatagctcacgctgtaggtatctcagttcggtgtaggtcgttcgctccaagctgggctgtgtgcacgaaccccccgttcagcccgaccgctgcgccttatccggtaactatcgtcttgagtccaacccggtaagacacgacttatcgccactggcagcagccactggtaacaggattagcagagcgaggtatgtaggcggtgctacagagttcttgaagtggtggcctaactacggctacactagaaggacagtatttggtatctgcgctctgctgaagccagttaccttcggaaaaagagttggtagctcttgatccggcaaacaaaccaccgctggtagcggtggtttttttgtttgcaagcagcagattacgcgcagaaaaaaaggatctcaagaagatcctttgatcttttctacggggtctgacgctcagtggaacgaaaactcacgttaagggattttggtcatgagattatcaaaaaggatcttcacctagatccttttaaattaaaaatgaagttttaaatcaatctaaagtatatatgagtaaacttggtctgacagttaccaatgcttaatcagtgaggcacctatctcagcgatctgtctatttcgttcatccatagttgcctgactccccgtcgtgtagataactacgatacgggagggcttaccatctggccccagtgctgcaatgataccgcgagacccacgctcaccggctccagatttatcagcaataaaccagccagccggaagggccgagcgcagaagtggtcctgcaactttatccgcctccatccagtctattaattgttgccgggaagctagagtaagtagttcgccagttaatagtttgcgcaacgttgttgccattgctacaggcatcgtggtgtcacgctcgtcgtttggtatggcttcattcagctccggttcccaacgatcaaggcgagttacatgatcccccatgttgtgcaaaaaagcggttagctccttcggtcctccgatcgttgtcagaagtaagttggccgcagtgttatcactcatggttatggcagcactgcataattctcttactgtcatgccatccgtaagatgcttttctgtgactggtgagtactcaaccaagtcattctgagaatagtgtatgcggcgaccgagttgctcttgcccggcgtcaatacgggataataccgcgccacatagcagaactttaaaagtgctcatcattggaaaacgttcttcggggcgaaaactctcaaggatcttaccgctgttgagatccagttcgatgtaacccactcgtgcacccaactgatcttcagcatcttttactttcaccagcgtttctgggtgagcaaaaacaggaaggcaaaatgccgcaaaaaagggaataagggcgacacggaaatgttgaatactcatactcttcctttttcaatattattgaagcatttatcagggttattgtctcatgagcggatacatatttgaatgtatttagaaaaataaacaaataggggttccgcgcacatttccccgaaaagtgccacctaaattgtaagcgttaatattttgttaaaattcgcgttaaatttttgttaaatcagctcattttttaaccaataggccgaaatcggcaaaatcccttataaatcaaaagaatagaccgagatagggttgagtgttgttccagtttggaacaagagtccactattaaagaacgtggactccaacgtcaaagggcgaaaaaccgtctatcagggcgatggcccactacgtgaaccatcaccctaatcaagttttttggggtcgaggtgccgtaaagcactaaatcggaaccctaaagggagcccccgatttagagcttgacggggaaagccggcgaacgtggcgagaaaggaagggaagaaagcgaaaggagcgggcgctagggcgctggcaagtgtagcggtcacgctgcgcgtaaccaccacacccgccgcgcttaatgcgccgctacagggcgcgtcccattcgccattcaggctgcgcaactgttgggaagggcgatcggtgcgggcctcttcgctattacgccagctggcgaaagggggatgtgctgcaaggcgattaagttgggtaacgccagggttttcccag

SEQ ID NO: 24 - DNA, 4440 bp, Artificial sequence
  Synthetic
gacggccagtgaattgtaatacgactcactatagggcgaattgggtaccgggccccccctcgaggtcgacggtatcgataagctttgagagtacaatgatgaacctagattaatcaatgccaaagtctgaaaaatgcaccctcagtctatgatccagaaaatcaagattgcttgaggccctgttcggttgttccggattagagccccggattaattcctagccggattacttctctaatttatatagattttgatgagctggaatgaatcctggcttattccggtacaaccgaacaggccctgaaggataccagtaatcgctgagctaaattggcatgctgtcagagtgtcagtattgcagcaaggtagtgagataaccggcatcatggtgccagtttgatggcaccattagggttagagatggtggccatgggcgcatgtcctggccaactttgtatgatatatggcagggtgaataggaaagtaaaattgtattgtaaaaagggatttcttctgtttgttagcgcatgtacaaggaatgcaagttttgagcgagggggcatcaaagatctggctgtgtttccagctgtttttgttagccccatcgaatccttgacataatgatcccgcttaaataagcaacctcgcttgtatagttccttgtgctctaacacacgatgatgataagtcgtaaaatagtggtgtccaaagaatttccaggcccagttgtaaaagctaaaatgctattcgaatttctactagcagtaagtcgtgtttagaaattatttttttatataccttttttccttctatgtacagtaggacacagtgtcagcgccgcgttgacggagaatatttgcaaaaaagtaaaagagaaagtcatagcggcgtatgtgccaaaaacttcgtcacagagagggccataagaaacatggcccacggcccaatacgaagcaccgcgacgaagcccaaacagcagtccgtaggtggagcaaagcgctgggtaatacgcaaacgttttgtcccaccttgactaatcacaagagtggagcgtaccttataaaccgagccgcaagcaccgaattgagtgctataatatgagtgggttttagagctagaaatagcaagttaaaataaggctagtccgttatcaacttgaaaaagtggcaccgagtcggtgctttttttttgcggccgcgaattcctgcagggccctcttgtcggaccagttgcccaccacgttggtgagctcggtgaggcccttcattgagaggaaggaggtcatgaggtgcctaccgatgtgggacttggggccgttcttgatggcgaagatggagtagggggcgttcttcttgagggccttgttgtaggacctcacgaggttgtccttgaggagctggtactcctgcttgttggaggaggagttgccggtcctgttcaccctcttgagcacgggctctgagttcctgaggaactcgtcgaggtacacgagggggtcgatcctgccgcgagcggagaagaagtagatgtgcctggacacggaggtcttggtctcggtcacgaggcactggatgatcacgccgaggtacttgttctgactagttctagagcggccgccaccgcggtggagctccagcttttgttccctttagtgagggttaatttcgagcttggcgtaatcatggtcatagctgtttcctgtgtgaaattgttatccgctcacaattccacacaacatacgagccggaagcataaagtgtaaagcctggggtgcctaatgagtgagctaactcacattaattgcgttgcgctcactgcccgctttccagtcgggaaacctgtcgtgccagctgcattaatgaatcggccaacgcgcggggagaggcggtttgcgtattgggcgctcttccgcttcctcgctcactgactcgctgcgctcggtcgttcggctgcggcgagcggtatcagctcactcaaaggcggtaatacggttatccacagaatcaggggataacgcaggaaagaacatgtgagcaaaaggccagcaaaaggccaggaaccgtaaaaaggccgcgttgctggcgtttttccataggctccgcccccctgacgagcatcacaaaaatcgacgctcaagtcagaggtggcgaaacccgacaggactataaagataccaggcgtttccccctggaagctccctcgtgcgctctcctgttccgaccctgccgcttaccggatacctgtccgcctttctcccttcgggaagcgtggcgctttctcatagctcacgctgtaggtatctcagttcggtgtaggtcgttcgctccaagctgggctgtgtgcacgaaccccccgttcagcccgaccgctgcgccttatccggtaactatcgtcttgagtccaacccggtaagacacgacttatcgccactggcagcagccactggtaacaggattagcagagcgaggtatgtaggcggtgctacagagttcttgaagtggtggcctaactacggctacactagaaggacagtatttggtatctgcgctctgctgaagccagttaccttcggaaaaagagttggtagctcttgatccggcaaacaaaccaccgctggtagcggtggtttttttgtttgcaagcagcagattacgcgcagaaaaaaaggatctcaagaagatcctttgatcttttctacggggtctgacgctcagtggaacgaaaactcacgttaagggattttggtcatgagattatcaaaaaggatcttcacctagatccttttaaattaaaaatgaagttttaaatcaatctaaagtatatatgagtaaacttggtctgacagttaccaatgcttaatcagtgaggcacctatctcagcgatctgtctatttcgttcatccatagttgcctgactccccgtcgtgtagataactacgatacgggagggcttaccatctggccccagtgctgcaatgataccgcgagacccacgctcaccggctccagatttatcagcaataaaccagccagccggaagggccgagcgcagaagtggtcctgcaactttatccgcctccatccagtctattaattgttgccgggaagctagagtaagtagttcgccagttaatagtttgcgcaacgttgttgccattgctacaggcatcgtggtgtcacgctcgtcgtttggtatggcttcattcagctccggttcccaacgatcaaggcgagttacatgatcccccatgttgtgcaaaaaagcggttagctccttcggtcctccgatcgttgtcagaagtaagttggccgcagtgttatcactcatggttatggcagcactgcataattctcttactgtcatgccatccgtaagatgcttttctgtgactggtgagtactcaaccaagtcattctgagaatagtgtatgcggcgaccgagttgctcttgcccggcgtcaatacgggataataccgcgccacatagcagaactttaaaagtgctcatcattggaaaacgttcttcggggcgaaaactctcaaggatcttaccgctgttgagatccagttcgatgtaacccactcgtgcacccaactgatcttcagcatcttttactttcaccagcgtttctgggtgagcaaaaacaggaaggcaaaatgccgcaaaaaagggaataagggcgacacggaaatgttgaatactcatactcttcctttttcaatattattgaagcatttatcagggttattgtctcatgagcggatacatatttgaatgtatttagaaaaataaacaaataggggttccgcgcacatttccccgaaaagtgccacctaaattgtaagcgttaatattttgttaaaattcgcgttaaatttttgttaaatcagctcattttttaaccaataggccgaaatcggcaaaatcccttataaatcaaaagaatagaccgagatagggttgagtgttgttccagtttggaacaagagtccactattaaagaacgtggactccaacgtcaaagggcgaaaaaccgtctatcagggcgatggcccactacgtgaaccatcaccctaatcaagttttttggggtcgaggtgccgtaaagcactaaatcggaaccctaaagggagcccccgatttagagcttgacggggaaagccggcgaacgtggcgagaaaggaagggaagaaagcgaaaggagcgggcgctagggcgctggcaagtgtagcggtcacgctgcgcgtaaccaccacacccgccgcgcttaatgcgccgctacagggcgcgtcccattcgccattcaggctgcgcaactgttgggaagggcgatcggtgcgggcctcttcgctattacgccagctggcgaaagggggatgtgctgcaaggcgattaagttgggtaacgccagggttttcccagtcacgacgttgtaaaac

SEQ ID NO: 25 - DNA, 4440 bp, Artificial sequence
  Synthetic
ttcccagtcacgacgttgtaaaacgacggccagtgaattgtaatacgactcactatagggcgaattgggtaccgggccccccctcgaggtcgacggtatcgataagctttgagagtacaatgatgaacctagattaatcaatgccaaagtctgaaaaatgcaccctcagtctatgatccagaaaatcaagattgcttgaggccctgttcggttgttccggattagagccccggattaattcctagccggattacttctctaatttatatagattttgatgagctggaatgaatcctggcttattccggtacaaccgaacaggccctgaaggataccagtaatcgctgagctaaattggcatgctgtcagagtgtcagtattgcagcaaggtagtgagataaccggcatcatggtgccagtttgatggcaccattagggttagagatggtggccatgggcgcatgtcctggccaactttgtatgatatatggcagggtgaataggaaagtaaaattgtattgtaaaaagggatttcttctgtttgttagcgcatgtacaaggaatgcaagttttgagcgagggggcatcaaagatctggctgtgtttccagctgtttttgttagccccatcgaatccttgacataatgatcccgcttaaataagcaacctcgcttgtatagttccttgtgctctaacacacgatgatgataagtcgtaaaatagtggtgtccaaagaatttccaggcccagttgtaaaagctaaaatgctattcgaatttctactagcagtaagtcgtgtttagaaattatttttttatataccttttttccttctatgtacagtaggacacagtgtcagcgccgcgttgacggagaatatttgcaaaaaagtaaaagagaaagtcatagcggcgtatgtgccaaaaacttcgtcacagagagggccataagaaacatggcccacggcccaatacgaagcaccgcgacgaagcccaaacagcagtccgtaggtggagcaaagcgctgggtaatacgcaaacgttttgtcccaccttgactaatcacaagagtggagcgtaccttataaaccgagccgcaagcaccgaattgtccaagtgaccgagcaagagttttagagctagaaatagcaagttaaaataaggctagtccgttatcaacttgaaaaagtggcaccgagtcggtgctttttttttgcggccgcgaattcctgcagggccctcttgtcggaccagttgcccaccacgttggtgagctcggtgaggcccttcattgagaggaaggaggtcatgaggtgcctaccgatgtgggacttggggccgttcttgatggcgaagatggagtagggggcgttcttcttgagggccttgttgtaggacctcacgaggttgtccttgaggagctggtactcctgcttgttggaggaggagttgccggtcctgttcaccctcttgagcacgggctctgagttcctgaggaactcgtcgaggtacacgagggggtcgatcctgccgcgagcggagaagaagtagatgtgcctggacacggaggtcttggtctcggtcacgaggcactggatgatcacgccgaggtacttgttctgactagttctagagcggccgccaccgcggtggagctccagcttttgttccctttagtgagggttaatttcgagcttggcgtaatcatggtcatagctgtttcctgtgtgaaattgttatccgctcacaattccacacaacatacgagccggaagcataaagtgtaaagcctggggtgcctaatgagtgagctaactcacattaattgcgttgcgctcactgcccgctttccagtcgggaaacctgtcgtgccagctgcattaatgaatcggccaacgcgcggggagaggcggtttgcgtattgggcgctcttccgcttcctcgctcactgactcgctgcgctcggtcgttcggctgcggcgagcggtatcagctcactcaaaggcggtaatacggttatccacagaatcaggggataacgcaggaaagaacatgtgagcaaaaggccagcaaaaggccaggaaccgtaaaaaggccgcgttgctggcgtttttccataggctccgcccccctgacgagcatcacaaaaatcgacgctcaagtcagaggtggcgaaacccgacaggactataaagataccaggcgtttccccctggaagctccctcgtgcgctctcctgttccgaccctgccgcttaccggatacctgtccgcctttctcccttcgggaagcgtggcgctttctcatagctcacgctgtaggtatctcagttcggtgtaggtcgttcgctccaagctgggctgtgtgcacgaaccccccgttcagcccgaccgctgcgccttatccggtaactatcgtcttgagtccaacccggtaagacacgacttatcgccactggcagcagccactggtaacaggattagcagagcgaggtatgtaggcggtgctacagagttcttgaagtggtggcctaactacggctacactagaaggacagtatttggtatctgcgctctgctgaagccagttaccttcggaaaaagagttggtagctcttgatccggcaaacaaaccaccgctggtagcggtggtttttttgtttgcaagcagcagattacgcgcagaaaaaaaggatctcaagaagatcctttgatcttttctacggggtctgacgctcagtggaacgaaaactcacgttaagggattttggtcatgagattatcaaaaaggatcttcacctagatccttttaaattaaaaatgaagttttaaatcaatctaaagtatatatgagtaaacttggtctgacagttaccaatgcttaatcagtgaggcacctatctcagcgatctgtctatttcgttcatccatagttgcctgactccccgtcgtgtagataactacgatacgggagggcttaccatctggccccagtgctgcaatgataccgcgagacccacgctcaccggctccagatttatcagcaataaaccagccagccggaagggccgagcgcagaagtggtcctgcaactttatccgcctccatccagtctattaattgttgccgggaagctagagtaagtagttcgccagttaatagtttgcgcaacgttgttgccattgctacaggcatcgtggtgtcacgctcgtcgtttggtatggcttcattcagctccggttcccaacgatcaaggcgagttacatgatcccccatgttgtgcaaaaaagcggttagctccttcggtcctccgatcgttgtcagaagtaagttggccgcagtgttatcactcatggttatggcagcactgcataattctcttactgtcatgccatccgtaagatgcttttctgtgactggtgagtactcaaccaagtcattctgagaatagtgtatgcggcgaccgagttgctcttgcccggcgtcaatacgggataataccgcgccacatagcagaactttaaaagtgctcatcattggaaaacgttcttcggggcgaaaactctcaaggatcttaccgctgttgagatccagttcgatgtaacccactcgtgcacccaactgatcttcagcatcttttactttcaccagcgtttctgggtgagcaaaaacaggaaggcaaaatgccgcaaaaaagggaataagggcgacacggaaatgttgaatactcatactcttcctttttcaatattattgaagcatttatcagggttattgtctcatgagcggatacatatttgaatgtatttagaaaaataaacaaataggggttccgcgcacatttccccgaaaagtgccacctaaattgtaagcgttaatattttgttaaaattcgcgttaaatttttgttaaatcagctcattttttaaccaataggccgaaatcggcaaaatcccttataaatcaaaagaatagaccgagatagggttgagtgttgttccagtttggaacaagagtccactattaaagaacgtggactccaacgtcaaagggcgaaaaaccgtctatcagggcgatggcccactacgtgaaccatcaccctaatcaagttttttggggtcgaggtgccgtaaagcactaaatcggaaccctaaagggagcccccgatttagagcttgacggggaaagccggcgaacgtggcgagaaaggaagggaagaaagcgaaaggagcgggcgctagggcgctggcaagtgtagcggtcacgctgcgcgtaaccaccacacccgccgcgcttaatgcgccgctacagggcgcgtcccattcgccattcaggctgcgcaactgttgggaagggcgatcggtgcgggcctcttcgctattacgccagctggcgaaagggggatgtgctgcaaggcgattaagttgggtaacgccagggtt

SEQ ID NO: 26 - DNA, 1494 bp, Artificial sequence
  Synthetic
atgggcgagagcgtgaaggccatcaagctgaagatcctggacatgttcctggacccggagtgcaccaagcaggacgacaactggaggaaggacctgagcaccatgagcaggttctgcgccgaggccggcaacatgtgcctgagggacctgtacaactacttcagcatgccgaaggaggacaggatcagcagcaaggacctgtacaacgccatgtaccacaagaccaagctgctgcacccggagctgccgggcaaggtggccaaccagatcgtgaaccacgccaaggacgtgtggaagaggaacgccaagctgatctacaggaaccagatcagcatgccgacctacaagatcaccaccgccccgatcaggctgcagaacaacatctacaagctgatcaagaacaagaacaagtacatcatcgacgtgcagctgtacagcaaggagtacagcaaggacagcggcaagggcacccacaggtacttcctggtggccgtgagggacagcagcaccaggatgatcttcgacaggatcatgagcaaggaccacatcgacagcagcaagagctacacccagggccagctgcagatcaagaaggaccaccagggcaagtggtactgcatcatcccgtacaccttcccgacccacgagaccgtgctggacccggacaaggtgatgggcgtggacctgggcgtggccaaggccgtgtactgggccttcaacagcagctacaagaggggctgcatcgacggcggcgagatcgagcacttcaggaagatgatcagggccaggagggtgagcatccagaaccagatcaagcacagcggcgacgccaggaagggccacggcaggaagagggccctgaagccgatcgagaccctgagcgagaaggagaagaacttcagggacaccatcaaccacaggtacgccaacaggatcgtggaggccgccatcaagcagggctgcggcaccatccagatcgagaacctggagggcatcgccgacaccaccggcagcaagttcctgaagaactggccgtactacgacctgcagaccaagatcgtgaacaaggccaaggagcacggcatcaccgtggtggccatcaacccgcagtacaccagccagaggtgcagcatgtgcggctacatcgagaagaccaacaggagcagccaggccgtgttcgagtgcaagcagtgcggctacggcagcaggaccatctgcatcaactgcaggcacgtgcaggtgagcggcgacgtgtgcgaggagtgcggcggcatcgtgaagaaggagaacgtgaacgccgactacaacgccgccaagaacatcagcaccccgtacatcgaccagatcatcatggagaagtgcctggagctgggcatcccgtacaggagcatcacctgcaaggagtgcggccacatccaggccagcggcaacacctgcgaggtgtgcggcagcaccaacatcctgaagccgaagaagatcaggaaggccaagtaa

SEQ ID NO: 27 - protein, 497 aa, Artificial sequence
  Synthetic
MGESVKAIKLKILDMFLDPECTKQDDNWRKDLSTMSRFCAEAGNMCLRDLYNYFSMPKEDRISSKDLYNAMYHKTKLLHPELPGKVANQIVNHAKDVWKRNAKLIYRNQISMPTYKITTAPIRLQNNIYKLIKNKNKYIIDVQLYSKEYSKDSGKGTHRYFLVAVRDSSTRMIFDRIMSKDHIDSSKSYTQGQLQIKKDHQGKWYCIIPYTFPTHETVLDPDKVMGVDLGVAKAVYWAFNSSYKRGCIDGGEIEHFRKMIRARRVSIQNQIKHSGDARKGHGRKRALKPIETLSEKEKNFRDTINHRYANRIVEAAIKQGCGTIQIENLEGIADTTGSKFLKNWPYYDLQTKIVNKAKEHGITVVAINPQYTSQRCSMCGYIEKTNRSSQAVFECKQCGYGSRTICINCRHVQVSGDVCEECGGIVKKENVNADYNAAKNISTPYIDQIIMEKCLELGIPYRSITCKECGHIQASGNTCEVCGSTNILKPKKIRKAK

SEQ ID NO: 28 - DNA, 1494 bp, Artificial sequence
  Synthetic
atgggcgagagcgtgaaggccatcaagctgaagatcctggacatgttcctggacccggagtgcaccaagcaggacgacaactggaggaaggacctgagcaccatgagcaggttctgcggcgaggccggcaacatgtgcctgagggacctgtacaactacttcagcatgccgaaggaggacaggatcagcagcaaggacctgtacaacgccatgtaccacaagaccaagctgctgcacccgggcctgccgggcaaggtgaagaaccagatcgtgaaccacgccaaggacgtgtggaagaggaacgccaagctgatctacaggaaccagatcagcatgccgacctacaagatcaccaccgccccgatcaggctgcagaacaacatctacaagctgatcaagaacaagaacaagtacatcatcgacgtgcagctgtacagcaaggagtacagcaaggacagcggcaagggcacccacaggtacttcctggtggccgtgagggacagcagcaccaggatgatcttcgacaggatcatgagcaaggaccacatcgacagcagcaagagctacacccagggccagctgcagatcaagaaggaccaccagggcaagtggtactgcatcatcccgtacaccttcccgacccacgagaccgtgctggacccggacaaggtgatgggcgtggccctgggcgtggccaaggccgtgtactgggccttcaacagcagctacaagaggggctgcatcgacggcggcgagatcgagcacttcaggaagatgatcagggccaggagggtgagcatccagaaccagatcaagcacagcggcgacgccaggaagggccacggcaggaagagggccctgaagccgatcgagaccctgagcgagaaggagaagaacttcagggacaccatcaaccacaggtacgccaacaggatcgtggaggccgccatcaagcagggctgcggcaccatccagatcgagaacctggagggcatcgccgacaggaccggcagcaagttcctgaagaactggccgtactacgacctgcagaccaagatcgtgaacaaggccaaggagcacggcatcaccgtggtggccatcaacccgcagtacaccagccagaggtgcagcatgtgcggctacatcgagaagaccaacaggagcagccaggccgtgttcgagtgcaagcagtgcggctacggcagcaggaccatctgcatcaactgcaggcacgtgcaggtgagcggcgacgtgtgcgaggagtgcggcggcatcgtgaagaaggagaacgtgaacgccgactacaacgccgccaagaacatcagcaccccgtacatcgaccagatcatcatggagaagtgcctggagctgggcatcccgtacaggagcatcacctgcaaggagtgcggccacatccaggccagcggcaacacctgcgaggtgtgcggcagcaccaacatcctgaagccgaagaagatcaggaaggccaagtaa

SEQ ID NO: 29 - protein, 497 aa, Artificial sequence
  Synthetic
MGESVKAIKLKILDMFLDPECTKQDDNWRKDLSTMSRFCGEAGNMCLRDLYNYFSMPKEDRISSKDLYNAMYHKTKLLHPGLPGKVKNQIVNHAKDVWKRNAKLIYRNQISMPTYKITTAPIRLQNNIYKLIKNKNKYIIDVQLYSKEYSKDSGKGTHRYFLVAVRDSSTRMIFDRIMSKDHIDSSKSYTQGQLQIKKDHQGKWYCIIPYTFPTHETVLDPDKVMGVALGVAKAVYWAFNSSYKRGCIDGGEIEHFRKMIRARRVSIQNQIKHSGDARKGHGRKRALKPIETLSEKEKNFRDTINHRYANRIVEAAIKQGCGTIQIENLEGIADRTGSKFLKNWPYYDLQTKIVNKAKEHGITVVAINPQYTSQRCSMCGYIEKTNRSSQAVFECKQCGYGSRTICINCRHVQVSGDVCEECGGIVKKENVNADYNAAKNISTPYIDQIIMEKCLELGIPYRSITCKECGHIQASGNTCEVCGSTNILKPKKIRKAK

SEQ ID NO: 30 - DNA, 9480 bp, Artificial sequence
  Synthetic
aaaccattattatcatgacattaacctataaaaataggcgtatcacgaggccctttcgtctcgcgcgtttcggtgatgacggtgaaaacctctgacacatgcagctcccggagacggtcacagcttgtctgtaagcggatgccgggagcagacaagcccgtcagggcgcgtcagcgggtgttggcgggtgtcggggctggcttaactatgcggcatcagagcagattgtactgagagtgcaccataccacagcttttcaattcaattcatcattttttttttattcttttttttgatttcggtttctttgaaatttttttgattcggtaatctccgaacagaaggaagaacgaaggaaggagcacagacttagattggtatatatacgcatatgtagtgttgaagaaacatgaaattgcccagtattcttaacccaactgcacagaacaaaaacctgcaggaaacgaagataaatcatgtcgaaagctacatataaggaacgtgctgctactcatcctagtcctgttgctgccaagctatttaatatcatgcacgaaaagcaaacaaacttgtgtgcttcattggatgttcgtaccaccaaggaattactggagttagttgaagcattaggtcccaaaatttgtttactaaaaacacatgtggatatcttgactgatttttccatggagggcacagttaagccgctaaaggcattatccgccaagtacaattttttactcttcgaagacagaaaatttgctgacattggtaatacagtcaaattgcagtactctgcgggtgtatacagaatagcagaatgggcagacattacgaatgcacacggtgtggtgggcccaggtattgttagcggtttgaagcaggcggcagaagaagtaacaaaggaacctagaggccttttgatgttagcagaattgtcatgcaagggctccctatctactggagaatatactaagggtactgttgacattgcgaagagcgacaaagattttgttatcggctttattgctcaaagagacatgggtggaagagatgaaggttacgattggttgattatgacacccggtgtgggtttagatgacaagggagacgcattgggtcaacagtatagaaccgtggatgatgtggtctctacaggatctgacattattattgttggaagaggactatttgcaaagggaagggatgctaaggtagagggtgaacgttacagaaaagcaggctgggaagcatatttgagaagatgcggccagcaaaactaaaaaaatgtattataagtaaacctgcaggggaagagcgcccaatacgcaaaccgcctctccccgcgcgttggccgattcattaatgcagctggcacgacaggtttcccgactggaaagcgggcagtgagcgcaacgcaattaatacgcgtaccgctagccaggaagagtttgtagaaacgcaaaaaggccatccgtcaggatggccttctgcttagtttgatgcctggcagtttatggcgggcgtcctgcccgccaccctccgggccgttgcttcacaacgttcaaatccgctcccggcggatttgtcctactcaggagagcgttcaccgacaaacaacagataaaacgaaaggcccagtcttccgactgagcctttcgttttatttgatgcctggcagttccctactctcgcgttcatggagctccaaataatgattttattttgactgatagtgacctgttcgttgcaacaaattgataagcaatgcttttttataatgccaactttgtatagaaaagttgggccgaattcgagctcggtacggccagaatggcccggaccgacctgcagtgcagcgtgacccggtcgtgcccctctctagagataatgagcattgcatgtctaagttataaaaaattaccacatattttttttgtcacacttgtttgaagtgcagtttatctatctttatacatatatttaaactttactctacgaataatataatctatagtactacaataatatcagtgttttagagaatcatataaatgaacagttagacatggtctaaaggacaattgagtattttgacaacaggactctacagttttatctttttagtgtgcatgtgttctcctttttttttgcaaatagcttcacctatataatacttcatccattttattagtacatccatttagggtttagggttaatggtttttatagactaatttttttagtacatctattttattctattttagcctctaaattaagaaaactaaaactctattttagtttttttatttaataatttagatataaaatagaataaaataaagtgactaaaaattaaacaaataccctttaagaaattaaaaaaactaaggaaacatttttcttgtttcgagtagataatgccagcctgttaaacgccgtcgacgagtctaacggacaccaaccagcgaaccagcagcgtcgcgtcgggccaagcgaagcagacggcacggcatctctgtcgctgcctctggacccctctcgagagttccgctccaccgttggacttgctccgctgtcggcatccagaaattgcgtggcggagcggcagacgtgagccggcacggcaggcggcctcctcctcctctcacggcaccggcagctacgggggattcctttcccaccgctccttcgctttcccttcctcgcccgccgtaataaatagacaccccctccacaccctctttccccaacctcgtgttgttcggagcgcacacacacacaaccagatctcccccaaatccacccgtcggcacctccgcttcaaggtacgccgctcgtcctcccccccccccctctctaccttctctagatcggcgttccggtccatgcatggttagggcccggtagttctacttctgttcatgtttgtgttagatccgtgtttgtgttagatccgtgctgctagcgttcgtacacggatgcgacctgtacgtcagacacgttctgattgctaacttgccagtgtttctctttggggaatcctgggatggctctagccgttccgcagacgggatcgatttcatgattttttttgtttcgttgcatagggtttggtttgcccttttcctttatttcaatatatgccgtgcacttgtttgtcgggtcatcttttcatgcttttttttgtcttggttgtgatgatgtggtctggttgggcggtcgttctagatcggagtagaattctgtttcaaactacctggtggatttattaattttggatctgtatgtgtgtgccatacatattcatagttacgaattgaagatgatggatggaaatatcgatctaggataggtatacatgttgatgcgggttttactgatgcatatacagagatgctttttgttcgcttggttgtgatgatgtggtgtggttgggcggtcgttcattcgttctagatcggagtagaatactgtttcaaactacctggtgtatttattaattttggaactgtatgtgtgtgtcatacatcttcatagttacgagtttaagatggatggaaatatcgatctaggataggtatacatgttgatgtgggttttactgatgcatatacatgatggcatatgcagcatctattcatatgctctaaccttgagtacctatctattataataaacaagtatgttttataattattttgatcttgatatacttggatgatggcatatgcagcagctatatgtggatttttttagccctgccttcatacgctatttatttgcttggtactgtttcttttgtcgatgctcaccctgttgtttggtgttacttctgcaggtcgactttaacttagcctaggatccatgggcgagagcgtcaaggcaataaaattaaagatcctcgacatgttcctcgaccccgagtgcaccaagcaggtaagtttctgcttctacctttgatatatatataataattatcattaattagtagtaatataatatttcaaatatttttttcaaaataaaagaatgtagtatatagcaattgcttttctgtagtttataagtgtgtatattttaatttataacttttctaatatatgaccaaaacatggtgatgtgcaggacgacaactggcgcaaggacctcagcaccatgagccgcttctgcggcgaggccggcaacatgtgcctcagggacctctacaactacttcagcatgcccaaggaggaccgcatcagctccaaggacttatataacgccatgtaccataaaactaagctcctccaccccggcctccccgggaaggtggctaaccaaatcgtcaaccacgccaaggacgtctggaagcgcaacgccaagctcatctaccgcaaccaaatcagcatgcccacatataagatcaccaccgcccccatccgcctccaaaataacatctacaaattaataaaaaataagaacaaatacataatcgacgtccagctctacagcaaggagtacagcaaggacagcggcaagggcacccacaggtacttcctcgtcgccgtcagggacagcagcaccaggatgatcttcgacaggatcatgagcaaggaccacatcgacagcagcaagagctacacccagggccagctccaaatcaagaaggaccaccagggcaagtggtactgcatcatcccctatacattccccacccacgaaaccgtcctcgaccccgacaaggtcatgggcgtcgccctcggggtggctaaggccgtctactgggctttcaacagcagctataaaagaggctgcatcgacggcggcgagatcgagcacttcaggaagatgatcagggcccggcgcgtcagcatccagaatcaaatcaaacacagcggcgacgcccgcaagggccacggcaggaagagggccctcaagcccatcgaaaccctcagcgagaaggagaagaacttccgcgacacaataaaccacaggtacgccaacaggatcgtcgaggccgctatcaagcagggctgcggcaccatccagatcgagaacctcgagggcatcgctgacaggaccggcagcaagttcctcaagaactggccctactacgacctccagaccaagatcgtcaataaagccaaggagcacggcatcaccgtcgtcgcaataaacccccagtatacatcccagcgctgcagcatgtgcggctacatcgagaaaaccaacaggagcagccaggccgtgttcgagtgcaagcagtgcggctacggcagccgcaccatctgcatcaactgcaggcacgtccaagtctccggcgacgtctgcgaggagtgcggcggcatcgtcaagaaggagaacgtcaacgccgactacaacgccgccaagaacatcagcaccccctacatcgaccagataataatggagaagtgcctcgagctcggcatcccctaccgctccatcacctgcaaggagtgcggccacatccaggctagcggcaacacctgcgaggtctgcggcagcaccaacatcctcaaaccaaagaagatccgcaaggcaaaaagcagggccgacccgaagaagaagcgcaaggtgggcagggctacgtgcgccaaggacatccaaaaagcagccgcggaggcggcactcgcctttcaggacgagacctgcgacaccaccaccaccaaccacggcctcgacatggaggagaccatggtcgaagccatctacacccccgagcagagcgagggcgccttctacatggacgaagagacaatgttcggcatgccaaccctcctcgacaacatggccgaaggcatgctgctgccgcccccgagcgtccagtggaaccacaactacgacggcgaaggcgacggggatgtgtccctgtggagctactaggtaccgtcatgggtcgtttaagctgccgatgtgcctgcgtcgtctggtgccctctctccatatggaggttgtcaaagtatctgctgttcgtgtcatgagtcgtgtcagtgttggtttaataatggaccggttgtgttgtgtgtgcgtactacccagaactatgacaaatcatgaataagtttgatgtttgaaattaaagcctgtgctcattatgttctgtctttcagttgtctcctaatatttgcctgcaggtactggctatctaccgtttcttacttaggaggtgtttgaatgcactaaaactaatagttagtggctaaaattagttaaaacatccaaacaccatagctaatagttgaactattagctatttttggaaaattagttaatagtgaggtagttatttgttagctagctaattcaactaacaatttttagccaactaacaattagtttcagtgcattcaaacacccccttaatgttaacgtggttctatctaccgtctcctaatatatggttgattgttcggtttgttgctatgctattgggttctgattgctgctagttcttgctgaatccagaagttctcgtagtatagctcagattcatattatttatttgagtgataagtgatccaggttattactatgttagctaggttttttttacaaggataaattatctgtgatcataattcttatgaaagctttatgtttcctggaggcagtggcatgcaatgcatgacagcaacttgatcacaccagctgaggtagatacggtaacaaggttcttaaatctgttcaccaaatcattggagaacacacatacacattcttgccagtcttggttagagaaatttcatgacaaaatgccaaagctgtcttgactcttcacttttggccatgagtcgtgacttaacggcaaacgctaattagtcactaggcccaggaaacactaactaagccctagcttatcctagcgcaacctagttaggtcttccccaagtttgtacaaaaaagttgaacgagaaacgtaaaatgatataaatatcaatatattaaattagattttgcataaaaaacagactacataatactgtaaaacacaacatatgcagtcactatgaaccaactacttagatggtattagtgacctgtagttaacgcggccgcgatatcccctatagtgagtcgtattacatggtcatagctgtttcctggcagctctggcccgtgtctcaaaatctctgatgttacattgcacaagataaaaatatatcatcatgaacaataaaactgtctgcttacataaacagtaatacaaggggtgttatgagccatattcaacgggaaacgtcgaggccgcgattaaattccaacatggatgctgatttatatgggtataaatgggctcgcgataatgtcgggcaatcaggtgcgacaatctatcgcttgtatgggaagcccgatgcgccagagttgtttctgaaacatggcaaaggtagcgttgccaatgatgttacagatgagatggtcagactaaactggctgacggaatttatgcctcttccgaccatcaagcattttatccgtactcctgatgatgcatggttactcaccactgcgatccccggaaaaacagcattccaggtattagaagaatatcctgattcaggtgaaaatattgttgatgcgctggcagtgttcctgcgccggttgcattcgattcctgtttgtaattgtccttttaacagcgatcgcgtatttcgtctcgctcaggcgcaatcacgaatgaataacggtttggttgatgcgagtgattttgatgacgagcgtaatggctggcctgttgaacaagtctggaaagaaatgcataaacttttgccattctcaccggattcagtcgtcactcatggtgatttctcacttgataaccttatttttgacgaggggaaattaataggttgtattgatgttggacgagtcggaatcgcagaccgataccaggatcttgccatcctatggaactgcctcggtgagttttctccttcattacagaaacggctttttcaaaaatatggtattgataatcctgatatgaataaattgcagtttcatttgatgctcgatgagtttttctaatcagaattggttaattggttgtaacactggcagagcattacgctgacttgacgggacggcgcaagctcatgaccaaaatcccttaacgtgagttacgcgtcgttccactgagcgtcagaccccgtagaaaagatcaaaggatcttcttgagatcctttttttctgcgcgtaatctgctgcttgcaaacaaaaaaaccaccgctaccagcggtggtttgtttgccggatcaagagctaccaactctttttccgaaggtaactggcttcagcagagcgcagataccaaatactgttcttctagtgtagccgtagttaggccaccacttcaagaactctgtagcaccgcctacatacctcgctctgctaatcctgttaccagtggctgctgccagtggcgataagtcgtgtcttaccgggttggactcaagacgatagttaccggataaggcgcagcggtcgggctgaacggggggttcgtgcacacagcccagcttggagcgaacgacctacaccgaactgagatacctacagcgtgagctatgagaaagcgccacgcttcccgaagggagaaaggcggacaggtatccggtaagcggcagggtcggaacaggagagcgcacgagggagcttccagggggaaacgcctggtatctttatagtcctgtcgggtttcgccacctctgacttgagcgtcgatttttgtgatgctcgtcaggggggcggagcctatggaaaaacgccagcaacgcggcctttttacggttcctggccttttgctggccttttgctcacatgttctttcctgcgttatcccctgattctgtggataaccgtattaccgcctttgagtgagctgataccgctcgccgcagccgaacgaccgagcgcagcgagtcagtgagcgaggaagccctgcagggtgccacctgggtccttttcatcacgtgctataaaaataattataatttaaattttttaatataaatatataaattaaaaatagaaagtaaaaaaagaaattaaagaaaaaatagtttttgttttccgaagatgtaaaagactctagggggatcgccaacaaatactaccttttatcttgctcttcctgctctcaggtattaatgccgaattgtttcatcttgtctgtgtagaagaccacacacgaaaatcctgtgattttacattttacttatcgttaatcgaatgtatatctatttaatctgcttttcttgtctaataaatatatatgtaaagtacgctttttgttgaaattttttaaacctttgtttatttttttttcttcattccgtaactcttctaccttctttatttactttctaaaatccaaatacaaaacataaaaataaataaacacagagtaaattcccaaattattccatcattaaaagatacgaggcgcgtgtaagttacaggcaagcgatccgtcctaag

SEQ ID NO: 31 - DNA, 9507 bp, Artificial sequence
  Synthetic
aaaccattattatcatgacattaacctataaaaataggcgtatcacgaggccctttcgtctcgcgcgtttcggtgatgacggtgaaaacctctgacacatgcagctcccggagacggtcacagcttgtctgtaagcggatgccgggagcagacaagcccgtcagggcgcgtcagcgggtgttggcgggtgtcggggctggcttaactatgcggcatcagagcagattgtactgagagtgcaccataccacagcttttcaattcaattcatcattttttttttattcttttttttgatttcggtttctttgaaatttttttgattcggtaatctccgaacagaaggaagaacgaaggaaggagcacagacttagattggtatatatacgcatatgtagtgttgaagaaacatgaaattgcccagtattcttaacccaactgcacagaacaaaaacctgcaggaaacgaagataaatcatgtcgaaagctacatataaggaacgtgctgctactcatcctagtcctgttgctgccaagctatttaatatcatgcacgaaaagcaaacaaacttgtgtgcttcattggatgttcgtaccaccaaggaattactggagttagttgaagcattaggtcccaaaatttgtttactaaaaacacatgtggatatcttgactgatttttccatggagggcacagttaagccgctaaaggcattatccgccaagtacaattttttactcttcgaagacagaaaatttgctgacattggtaatacagtcaaattgcagtactctgcgggtgtatacagaatagcagaatgggcagacattacgaatgcacacggtgtggtgggcccaggtattgttagcggtttgaagcaggcggcagaagaagtaacaaaggaacctagaggccttttgatgttagcagaattgtcatgcaagggctccctatctactggagaatatactaagggtactgttgacattgcgaagagcgacaaagattttgttatcggctttattgctcaaagagacatgggtggaagagatgaaggttacgattggttgattatgacacccggtgtgggtttagatgacaagggagacgcattgggtcaacagtatagaaccgtggatgatgtggtctctacaggatctgacattattattgttggaagaggactatttgcaaagggaagggatgctaaggtagagggtgaacgttacagaaaagcaggctgggaagcatatttgagaagatgcggccagcaaaactaaaaaaatgtattataagtaaacctgcaggggaagagcgcccaatacgcaaaccgcctctccccgcgcgttggccgattcattaatgcagctggcacgacaggtttcccgactggaaagcgggcagtgagcgcaacgcaattaatacgcgtaccgctagccaggaagagtttgtagaaacgcaaaaaggccatccgtcaggatggccttctgcttagtttgatgcctggcagtttatggcgggcgtcctgcccgccaccctccgggccgttgcttcacaacgttcaaatccgctcccggcggatttgtcctactcaggagagcgttcaccgacaaacaacagataaaacgaaaggcccagtcttccgactgagcctttcgttttatttgatgcctggcagttccctactctcgcgttcatggagctccaaataatgattttattttgactgatagtgacctgttcgttgcaacaaattgataagcaatgcttttttataatgccaactttgtatagaaaagttgggccgaattcgagctcggtacggccagaatggcccggaccgacctgcagtgcagcgtgacccggtcgtgcccctctctagagataatgagcattgcatgtctaagttataaaaaattaccacatattttttttgtcacacttgtttgaagtgcagtttatctatctttatacatatatttaaactttactctacgaataatataatctatagtactacaataatatcagtgttttagagaatcatataaatgaacagttagacatggtctaaaggacaattgagtattttgacaacaggactctacagttttatctttttagtgtgcatgtgttctcctttttttttgcaaatagcttcacctatataatacttcatccattttattagtacatccatttagggtttagggttaatggtttttatagactaatttttttagtacatctattttattctattttagcctctaaattaagaaaactaaaactctattttagtttttttatttaataatttagatataaaatagaataaaataaagtgactaaaaattaaacaaataccctttaagaaattaaaaaaactaaggaaacatttttcttgtttcgagtagataatgccagcctgttaaacgccgtcgacgagtctaacggacaccaaccagcgaaccagcagcgtcgcgtcgggccaagcgaagcagacggcacggcatctctgtcgctgcctctggacccctctcgagagttccgctccaccgttggacttgctccgctgtcggcatccagaaattgcgtggcggagcggcagacgtgagccggcacggcaggcggcctcctcctcctctcacggcaccggcagctacgggggattcctttcccaccgctccttcgctttcccttcctcgcccgccgtaataaatagacaccccctccacaccctctttccccaacctcgtgttgttcggagcgcacacacacacaaccagatctcccccaaatccacccgtcggcacctccgcttcaaggtacgccgctcgtcctcccccccccccctctctaccttctctagatcggcgttccggtccatgcatggttagggcccggtagttctacttctgttcatgtttgtgttagatccgtgtttgtgttagatccgtgctgctagcgttcgtacacggatgcgacctgtacgtcagacacgttctgattgctaacttgccagtgtttctctttggggaatcctgggatggctctagccgttccgcagacgggatcgatttcatgattttttttgtttcgttgcatagggtttggtttgcccttttcctttatttcaatatatgccgtgcacttgtttgtcgggtcatcttttcatgcttttttttgtcttggttgtgatgatgtggtctggttgggcggtcgttctagatcggagtagaattctgtttcaaactacctggtggatttattaattttggatctgtatgtgtgtgccatacatattcatagttacgaattgaagatgatggatggaaatatcgatctaggataggtatacatgttgatgcgggttttactgatgcatatacagagatgctttttgttcgcttggttgtgatgatgtggtgtggttgggcggtcgttcattcgttctagatcggagtagaatactgtttcaaactacctggtgtatttattaattttggaactgtatgtgtgtgtcatacatcttcatagttacgagtttaagatggatggaaatatcgatctaggataggtatacatgttgatgtgggttttactgatgcatatacatgatggcatatgcagcatctattcatatgctctaaccttgagtacctatctattataataaacaagtatgttttataattattttgatcttgatatacttggatgatggcatatgcagcagctatatgtggatttttttagccctgccttcatacgctatttatttgcttggtactgtttcttttgtcgatgctcaccctgttgtttggtgttacttctgcaggtcgactttaacttagcctaggatccatggcaccgaagaagaagcgcaaggtgatgggcgagagcgtcaaggcaataaaattaaagatcctcgacatgttcctcgaccccgagtgcaccaagcaggtaagtttctgcttctacctttgatatatatataataattatcattaattagtagtaatataatatttcaaatatttttttcaaaataaaagaatgtagtatatagcaattgcttttctgtagtttataagtgtgtatattttaatttataacttttctaatatatgaccaaaacatggtgatgtgcaggacgacaactggcgcaaggacctcagcaccatgagccgcttctgcggcgaggccggcaacatgtgcctcagggacctctacaactacttcagcatgcccaaggaggaccgcatcagctccaaggacttatataacgccatgtaccataaaactaagctcctccaccccggcctccccgggaaggtggctaaccaaatcgtcaaccacgccaaggacgtctggaagcgcaacgccaagctcatctaccgcaaccaaatcagcatgcccacatataagatcaccaccgcccccatccgcctccaaaataacatctacaaattaataaaaaataagaacaaatacataatcgacgtccagctctacagcaaggagtacagcaaggacagcggcaagggcacccacaggtacttcctcgtcgccgtcagggacagcagcaccaggatgatcttcgacaggatcatgagcaaggaccacatcgacagcagcaagagctacacccagggccagctccaaatcaagaaggaccaccagggcaagtggtactgcatcatcccctatacattccccacccacgaaaccgtcctcgaccccgacaaggtcatgggcgtcgccctcggggtggctaaggccgtctactgggctttcaacagcagctataaaagaggctgcatcgacggcggcgagatcgagcacttcaggaagatgatcagggcccggcgcgtcagcatccagaatcaaatcaaacacagcggcgacgcccgcaagggccacggcaggaagagggccctcaagcccatcgaaaccctcagcgagaaggagaagaacttccgcgacacaataaaccacaggtacgccaacaggatcgtcgaggccgctatcaagcagggctgcggcaccatccagatcgagaacctcgagggcatcgctgacaggaccggcagcaagttcctcaagaactggccctactacgacctccagaccaagatcgtcaataaagccaaggagcacggcatcaccgtcgtcgcaataaacccccagtatacatcccagcgctgcagcatgtgcggctacatcgagaaaaccaacaggagcagccaggccgtgttcgagtgcaagcagtgcggctacggcagccgcaccatctgcatcaactgcaggcacgtccaagtctccggcgacgtctgcgaggagtgcggcggcatcgtcaagaaggagaacgtcaacgccgactacaacgccgccaagaacatcagcaccccctacatcgaccagataataatggagaagtgcctcgagctcggcatcccctaccgctccatcacctgcaaggagtgcggccacatccaggctagcggcaacacctgcgaggtctgcggcagcaccaacatcctcaaaccaaagaagatccgcaaggcaaaaagcagggccgacccgaagaagaagcgcaaggtgggcagggctacgtgcgccaaggacatccaaaaagcagccgcggaggcggcactcgcctttcaggacgagacctgcgacaccaccaccaccaaccacggcctcgacatggaggagaccatggtcgaagccatctacacccccgagcagagcgagggcgccttctacatggacgaagagacaatgttcggcatgccaaccctcctcgacaacatggccgaaggcatgctgctgccgcccccgagcgtccagtggaaccacaactacgacggcgaaggcgacggggatgtgtccctgtggagctactaggtaccgtcatgggtcgtttaagctgccgatgtgcctgcgtcgtctggtgccctctctccatatggaggttgtcaaagtatctgctgttcgtgtcatgagtcgtgtcagtgttggtttaataatggaccggttgtgttgtgtgtgcgtactacccagaactatgacaaatcatgaataagtttgatgtttgaaattaaagcctgtgctcattatgttctgtctttcagttgtctcctaatatttgcctgcaggtactggctatctaccgtttcttacttaggaggtgtttgaatgcactaaaactaatagttagtggctaaaattagttaaaacatccaaacaccatagctaatagttgaactattagctatttttggaaaattagttaatagtgaggtagttatttgttagctagctaattcaactaacaatttttagccaactaacaattagtttcagtgcattcaaacacccccttaatgttaacgtggttctatctaccgtctcctaatatatggttgattgttcggtttgttgctatgctattgggttctgattgctgctagttcttgctgaatccagaagttctcgtagtatagctcagattcatattatttatttgagtgataagtgatccaggttattactatgttagctaggttttttttacaaggataaattatctgtgatcataattcttatgaaagctttatgtttcctggaggcagtggcatgcaatgcatgacagcaacttgatcacaccagctgaggtagatacggtaacaaggttcttaaatctgttcaccaaatcattggagaacacacatacacattcttgccagtcttggttagagaaatttcatgacaaaatgccaaagctgtcttgactcttcacttttggccatgagtcgtgacttaacggcaaacgctaattagtcactaggcccaggaaacactaactaagccctagcttatcctagcgcaacctagttaggtcttccccaagtttgtacaaaaaagttgaacgagaaacgtaaaatgatataaatatcaatatattaaattagattttgcataaaaaacagactacataatactgtaaaacacaacatatgcagtcactatgaaccaactacttagatggtattagtgacctgtagttaacgcggccgcgatatcccctatagtgagtcgtattacatggtcatagctgtttcctggcagctctggcccgtgtctcaaaatctctgatgttacattgcacaagataaaaatatatcatcatgaacaataaaactgtctgcttacataaacagtaatacaaggggtgttatgagccatattcaacgggaaacgtcgaggccgcgattaaattccaacatggatgctgatttatatgggtataaatgggctcgcgataatgtcgggcaatcaggtgcgacaatctatcgcttgtatgggaagcccgatgcgccagagttgtttctgaaacatggcaaaggtagcgttgccaatgatgttacagatgagatggtcagactaaactggctgacggaatttatgcctcttccgaccatcaagcattttatccgtactcctgatgatgcatggttactcaccactgcgatccccggaaaaacagcattccaggtattagaagaatatcctgattcaggtgaaaatattgttgatgcgctggcagtgttcctgcgccggttgcattcgattcctgtttgtaattgtccttttaacagcgatcgcgtatttcgtctcgctcaggcgcaatcacgaatgaataacggtttggttgatgcgagtgattttgatgacgagcgtaatggctggcctgttgaacaagtctggaaagaaatgcataaacttttgccattctcaccggattcagtcgtcactcatggtgatttctcacttgataaccttatttttgacgaggggaaattaataggttgtattgatgttggacgagtcggaatcgcagaccgataccaggatcttgccatcctatggaactgcctcggtgagttttctccttcattacagaaacggctttttcaaaaatatggtattgataatcctgatatgaataaattgcagtttcatttgatgctcgatgagtttttctaatcagaattggttaattggttgtaacactggcagagcattacgctgacttgacgggacggcgcaagctcatgaccaaaatcccttaacgtgagttacgcgtcgttccactgagcgtcagaccccgtagaaaagatcaaaggatcttcttgagatcctttttttctgcgcgtaatctgctgcttgcaaacaaaaaaaccaccgctaccagcggtggtttgtttgccggatcaagagctaccaactctttttccgaaggtaactggcttcagcagagcgcagataccaaatactgttcttctagtgtagccgtagttaggccaccacttcaagaactctgtagcaccgcctacatacctcgctctgctaatcctgttaccagtggctgctgccagtggcgataagtcgtgtcttaccgggttggactcaagacgatagttaccggataaggcgcagcggtcgggctgaacggggggttcgtgcacacagcccagcttggagcgaacgacctacaccgaactgagatacctacagcgtgagctatgagaaagcgccacgcttcccgaagggagaaaggcggacaggtatccggtaagcggcagggtcggaacaggagagcgcacgagggagcttccagggggaaacgcctggtatctttatagtcctgtcgggtttcgccacctctgacttgagcgtcgatttttgtgatgctcgtcaggggggcggagcctatggaaaaacgccagcaacgcggcctttttacggttcctggccttttgctggccttttgctcacatgttctttcctgcgttatcccctgattctgtggataaccgtattaccgcctttgagtgagctgataccgctcgccgcagccgaacgaccgagcgcagcgagtcagtgagcgaggaagccctgcagggtgccacctgggtccttttcatcacgtgctataaaaataattataatttaaattttttaatataaatatataaattaaaaatagaaagtaaaaaaagaaattaaagaaaaaatagtttttgttttccgaagatgtaaaagactctagggggatcgccaacaaatactaccttttatcttgctcttcctgctctcaggtattaatgccgaattgtttcatcttgtctgtgtagaagaccacacacgaaaatcctgtgattttacattttacttatcgttaatcgaatgtatatctatttaatctgcttttcttgtctaataaatatatatgtaaagtacgctttttgttgaaattttttaaacctttgtttatttttttttcttcattccgtaactcttctaccttctttatttactttctaaaatccaaatacaaaacataaaaataaataaacacagagtaaattcccaaattattccatcattaaaagatacgaggcgcgtgtaagttacaggcaagcgatccgtcctaag

SEQ ID NO: 32 - DNA, 9504 bp, Artificial sequence
  Synthetic
aaaccattattatcatgacattaacctataaaaataggcgtatcacgaggccctttcgtctcgcgcgtttcggtgatgacggtgaaaacctctgacacatgcagctcccggagacggtcacagcttgtctgtaagcggatgccgggagcagacaagcccgtcagggcgcgtcagcgggtgttggcgggtgtcggggctggcttaactatgcggcatcagagcagattgtactgagagtgcaccataccacagcttttcaattcaattcatcattttttttttattcttttttttgatttcggtttctttgaaatttttttgattcggtaatctccgaacagaaggaagaacgaaggaaggagcacagacttagattggtatatatacgcatatgtagtgttgaagaaacatgaaattgcccagtattcttaacccaactgcacagaacaaaaacctgcaggaaacgaagataaatcatgtcgaaagctacatataaggaacgtgctgctactcatcctagtcctgttgctgccaagctatttaatatcatgcacgaaaagcaaacaaacttgtgtgcttcattggatgttcgtaccaccaaggaattactggagttagttgaagcattaggtcccaaaatttgtttactaaaaacacatgtggatatcttgactgatttttccatggagggcacagttaagccgctaaaggcattatccgccaagtacaattttttactcttcgaagacagaaaatttgctgacattggtaatacagtcaaattgcagtactctgcgggtgtatacagaatagcagaatgggcagacattacgaatgcacacggtgtggtgggcccaggtattgttagcggtttgaagcaggcggcagaagaagtaacaaaggaacctagaggccttttgatgttagcagaattgtcatgcaagggctccctatctactggagaatatactaagggtactgttgacattgcgaagagcgacaaagattttgttatcggctttattgctcaaagagacatgggtggaagagatgaaggttacgattggttgattatgacacccggtgtgggtttagatgacaagggagacgcattgggtcaacagtatagaaccgtggatgatgtggtctctacaggatctgacattattattgttggaagaggactatttgcaaagggaagggatgctaaggtagagggtgaacgttacagaaaagcaggctgggaagcatatttgagaagatgcggccagcaaaactaaaaaaatgtattataagtaaacctgcaggggaagagcgcccaatacgcaaaccgcctctccccgcgcgttggccgattcattaatgcagctggcacgacaggtttcccgactggaaagcgggcagtgagcgcaacgcaattaatacgcgtaccgctagccaggaagagtttgtagaaacgcaaaaaggccatccgtcaggatggccttctgcttagtttgatgcctggcagtttatggcgggcgtcctgcccgccaccctccgggccgttgcttcacaacgttcaaatccgctcccggcggatttgtcctactcaggagagcgttcaccgacaaacaacagataaaacgaaaggcccagtcttccgactgagcctttcgttttatttgatgcctggcagttccctactctcgcgttcatggagctccaaataatgattttattttgactgatagtgacctgttcgttgcaacaaattgataagcaatgcttttttataatgccaactttgtatagaaaagttgggccgaattcgagctcggtacggccagaatggcccggaccgacctgcagtgcagcgtgacccggtcgtgcccctctctagagataatgagcattgcatgtctaagttataaaaaattaccacatattttttttgtcacacttgtttgaagtgcagtttatctatctttatacatatatttaaactttactctacgaataatataatctatagtactacaataatatcagtgttttagagaatcatataaatgaacagttagacatggtctaaaggacaattgagtattttgacaacaggactctacagttttatctttttagtgtgcatgtgttctcctttttttttgcaaatagcttcacctatataatacttcatccattttattagtacatccatttagggtttagggttaatggtttttatagactaatttttttagtacatctattttattctattttagcctctaaattaagaaaactaaaactctattttagtttttttatttaataatttagatataaaatagaataaaataaagtgactaaaaattaaacaaataccctttaagaaattaaaaaaactaaggaaacatttttcttgtttcgagtagataatgccagcctgttaaacgccgtcgacgagtctaacggacaccaaccagcgaaccagcagcgtcgcgtcgggccaagcgaagcagacggcacggcatctctgtcgctgcctctggacccctctcgagagttccgctccaccgttggacttgctccgctgtcggcatccagaaattgcgtggcggagcggcagacgtgagccggcacggcaggcggcctcctcctcctctcacggcaccggcagctacgggggattcctttcccaccgctccttcgctttcccttcctcgcccgccgtaataaatagacaccccctccacaccctctttccccaacctcgtgttgttcggagcgcacacacacacaaccagatctcccccaaatccacccgtcggcacctccgcttcaaggtacgccgctcgtcctcccccccccccctctctaccttctctagatcggcgttccggtccatgcatggttagggcccggtagttctacttctgttcatgtttgtgttagatccgtgtttgtgttagatccgtgctgctagcgttcgtacacggatgcgacctgtacgtcagacacgttctgattgctaacttgccagtgtttctctttggggaatcctgggatggctctagccgttccgcagacgggatcgatttcatgattttttttgtttcgttgcatagggtttggtttgcccttttcctttatttcaatatatgccgtgcacttgtttgtcgggtcatcttttcatgcttttttttgtcttggttgtgatgatgtggtctggttgggcggtcgttctagatcggagtagaattctgtttcaaactacctggtggatttattaattttggatctgtatgtgtgtgccatacatattcatagttacgaattgaagatgatggatggaaatatcgatctaggataggtatacatgttgatgcgggttttactgatgcatatacagagatgctttttgttcgcttggttgtgatgatgtggtgtggttgggcggtcgttcattcgttctagatcggagtagaatactgtttcaaactacctggtgtatttattaattttggaactgtatgtgtgtgtcatacatcttcatagttacgagtttaagatggatggaaatatcgatctaggataggtatacatgttgatgtgggttttactgatgcatatacatgatggcatatgcagcatctattcatatgctctaaccttgagtacctatctattataataaacaagtatgttttataattattttgatcttgatatacttggatgatggcatatgcagcagctatatgtggatttttttagccctgccttcatacgctatttatttgcttggtactgtttcttttgtcgatgctcaccctgttgtttggtgttacttctgcaggtcgactttaacttagcctaggatccatgacgtgcgccaaggacatccaaaaagcagccgcggaggcggcactcgcctttcaggacgagacctgcgacaccaccaccaccaaccacggcctcgacatggaggagaccatggtcgaagccatctacacccccgagcagagcgagggcgccttctacatggacgaagagacaatgttcggcatgccaaccctcctcgacaacatggccgaaggcatgctgctgccgcccccgagcgtccagtggaaccacaactacgacggcgaaggcgacggggatgtgtccctgtggagctacggcagggctccgaagaagaagcgcaaggtgatgggcgagagcgtcaaggcaataaaattaaagatcctcgacatgttcctcgaccccgagtgcaccaagcaggtaagtttctgcttctacctttgatatatatataataattatcattaattagtagtaatataatatttcaaatatttttttcaaaataaaagaatgtagtatatagcaattgcttttctgtagtttataagtgtgtatattttaatttataacttttctaatatatgaccaaaacatggtgatgtgcaggacgacaactggcgcaaggacctcagcaccatgagccgcttctgcggcgaggccggcaacatgtgcctcagggacctctacaactacttcagcatgcccaaggaggaccgcatcagctccaaggacttatataacgccatgtaccataaaactaagctcctccaccccggcctccccgggaaggtggctaaccaaatcgtcaaccacgccaaggacgtctggaagcgcaacgccaagctcatctaccgcaaccaaatcagcatgcccacatataagatcaccaccgcccccatccgcctccaaaataacatctacaaattaataaaaaataagaacaaatacataatcgacgtccagctctacagcaaggagtacagcaaggacagcggcaagggcacccacaggtacttcctcgtcgccgtcagggacagcagcaccaggatgatcttcgacaggatcatgagcaaggaccacatcgacagcagcaagagctacacccagggccagctccaaatcaagaaggaccaccagggcaagtggtactgcatcatcccctatacattccccacccacgaaaccgtcctcgaccccgacaaggtcatgggcgtcgccctcggggtggctaaggccgtctactgggctttcaacagcagctataaaagaggctgcatcgacggcggcgagatcgagcacttcaggaagatgatcagggcccggcgcgtcagcatccagaatcaaatcaaacacagcggcgacgcccgcaagggccacggcaggaagagggccctcaagcccatcgaaaccctcagcgagaaggagaagaacttccgcgacacaataaaccacaggtacgccaacaggatcgtcgaggccgctatcaagcagggctgcggcaccatccagatcgagaacctcgagggcatcgctgacaggaccggcagcaagttcctcaagaactggccctactacgacctccagaccaagatcgtcaataaagccaaggagcacggcatcaccgtcgtcgcaataaacccccagtatacatcccagcgctgcagcatgtgcggctacatcgagaaaaccaacaggagcagccaggccgtgttcgagtgcaagcagtgcggctacggcagccgcaccatctgcatcaactgcaggcacgtccaagtctccggcgacgtctgcgaggagtgcggcggcatcgtcaagaaggagaacgtcaacgccgactacaacgccgccaagaacatcagcaccccctacatcgaccagataataatggagaagtgcctcgagctcggcatcccctaccgctccatcacctgcaaggagtgcggccacatccaggctagcggcaacacctgcgaggtctgcggcagcaccaacatcctcaaaccaaagaagatccgcaaggcaaaaagcagggccgacccgaagaagaagcgcaaggtgtaggtaccgtcatgggtcgtttaagctgccgatgtgcctgcgtcgtctggtgccctctctccatatggaggttgtcaaagtatctgctgttcgtgtcatgagtcgtgtcagtgttggtttaataatggaccggttgtgttgtgtgtgcgtactacccagaactatgacaaatcatgaataagtttgatgtttgaaattaaagcctgtgctcattatgttctgtctttcagttgtctcctaatatttgcctgcaggtactggctatctaccgtttcttacttaggaggtgtttgaatgcactaaaactaatagttagtggctaaaattagttaaaacatccaaacaccatagctaatagttgaactattagctatttttggaaaattagttaatagtgaggtagttatttgttagctagctaattcaactaacaatttttagccaactaacaattagtttcagtgcattcaaacacccccttaatgttaacgtggttctatctaccgtctcctaatatatggttgattgttcggtttgttgctatgctattgggttctgattgctgctagttcttgctgaatccagaagttctcgtagtatagctcagattcatattatttatttgagtgataagtgatccaggttattactatgttagctaggttttttttacaaggataaattatctgtgatcataattcttatgaaagctttatgtttcctggaggcagtggcatgcaatgcatgacagcaacttgatcacaccagctgaggtagatacggtaacaaggttcttaaatctgttcaccaaatcattggagaacacacatacacattcttgccagtcttggttagagaaatttcatgacaaaatgccaaagctgtcttgactcttcacttttggccatgagtcgtgacttaacggcaaacgctaattagtcactaggcccaggaaacactaactaagccctagcttatcctagcgcaacctagttaggtcttccccaagtttgtacaaaaaagttgaacgagaaacgtaaaatgatataaatatcaatatattaaattagattttgcataaaaaacagactacataatactgtaaaacacaacatatgcagtcactatgaaccaactacttagatggtattagtgacctgtagttaacgcggccgcgatatcccctatagtgagtcgtattacatggtcatagctgtttcctggcagctctggcccgtgtctcaaaatctctgatgttacattgcacaagataaaaatatatcatcatgaacaataaaactgtctgcttacataaacagtaatacaaggggtgttatgagccatattcaacgggaaacgtcgaggccgcgattaaattccaacatggatgctgatttatatgggtataaatgggctcgcgataatgtcgggcaatcaggtgcgacaatctatcgcttgtatgggaagcccgatgcgccagagttgtttctgaaacatggcaaaggtagcgttgccaatgatgttacagatgagatggtcagactaaactggctgacggaatttatgcctcttccgaccatcaagcattttatccgtactcctgatgatgcatggttactcaccactgcgatccccggaaaaacagcattccaggtattagaagaatatcctgattcaggtgaaaatattgttgatgcgctggcagtgttcctgcgccggttgcattcgattcctgtttgtaattgtccttttaacagcgatcgcgtatttcgtctcgctcaggcgcaatcacgaatgaataacggtttggttgatgcgagtgattttgatgacgagcgtaatggctggcctgttgaacaagtctggaaagaaatgcataaacttttgccattctcaccggattcagtcgtcactcatggtgatttctcacttgataaccttatttttgacgaggggaaattaataggttgtattgatgttggacgagtcggaatcgcagaccgataccaggatcttgccatcctatggaactgcctcggtgagttttctccttcattacagaaacggctttttcaaaaatatggtattgataatcctgatatgaataaattgcagtttcatttgatgctcgatgagtttttctaatcagaattggttaattggttgtaacactggcagagcattacgctgacttgacgggacggcgcaagctcatgaccaaaatcccttaacgtgagttacgcgtcgttccactgagcgtcagaccccgtagaaaagatcaaaggatcttcttgagatcctttttttctgcgcgtaatctgctgcttgcaaacaaaaaaaccaccgctaccagcggtggtttgtttgccggatcaagagctaccaactctttttccgaaggtaactggcttcagcagagcgcagataccaaatactgttcttctagtgtagccgtagttaggccaccacttcaagaactctgtagcaccgcctacatacctcgctctgctaatcctgttaccagtggctgctgccagtggcgataagtcgtgtcttaccgggttggactcaagacgatagttaccggataaggcgcagcggtcgggctgaacggggggttcgtgcacacagcccagcttggagcgaacgacctacaccgaactgagatacctacagcgtgagctatgagaaagcgccacgcttcccgaagggagaaaggcggacaggtatccggtaagcggcagggtcggaacaggagagcgcacgagggagcttccagggggaaacgcctggtatctttatagtcctgtcgggtttcgccacctctgacttgagcgtcgatttttgtgatgctcgtcaggggggcggagcctatggaaaaacgccagcaacgcggcctttttacggttcctggccttttgctggccttttgctcacatgttctttcctgcgttatcccctgattctgtggataaccgtattaccgcctttgagtgagctgataccgctcgccgcagccgaacgaccgagcgcagcgagtcagtgagcgaggaagccctgcagggtgccacctgggtccttttcatcacgtgctataaaaataattataatttaaattttttaatataaatatataaattaaaaatagaaagtaaaaaaagaaattaaagaaaaaatagtttttgttttccgaagatgtaaaagactctagggggatcgccaacaaatactaccttttatcttgctcttcctgctctcaggtattaatgccgaattgtttcatcttgtctgtgtagaagaccacacacgaaaatcctgtgattttacattttacttatcgttaatcgaatgtatatctatttaatctgcttttcttgtctaataaatatatatgtaaagtacgctttttgttgaaattttttaaacctttgtttatttttttttcttcattccgtaactcttctaccttctttatttactttctaaaatccaaatacaaaacataaaaataaataaacacagagtaaattcccaaattattccatcattaaaagatacgaggcgcgtgtaagttacaggcaagcgatccgtcctaag

SEQ ID NO: 33 - DNA, 9480 bp, Artificial sequence
  Synthetic
aaaccattattatcatgacattaacctataaaaataggcgtatcacgaggccctttcgtctcgcgcgtttcggtgatgacggtgaaaacctctgacacatgcagctcccggagacggtcacagcttgtctgtaagcggatgccgggagcagacaagcccgtcagggcgcgtcagcgggtgttggcgggtgtcggggctggcttaactatgcggcatcagagcagattgtactgagagtgcaccataccacagcttttcaattcaattcatcattttttttttattcttttttttgatttcggtttctttgaaatttttttgattcggtaatctccgaacagaaggaagaacgaaggaaggagcacagacttagattggtatatatacgcatatgtagtgttgaagaaacatgaaattgcccagtattcttaacccaactgcacagaacaaaaacctgcaggaaacgaagataaatcatgtcgaaagctacatataaggaacgtgctgctactcatcctagtcctgttgctgccaagctatttaatatcatgcacgaaaagcaaacaaacttgtgtgcttcattggatgttcgtaccaccaaggaattactggagttagttgaagcattaggtcccaaaatttgtttactaaaaacacatgtggatatcttgactgatttttccatggagggcacagttaagccgctaaaggcattatccgccaagtacaattttttactcttcgaagacagaaaatttgctgacattggtaatacagtcaaattgcagtactctgcgggtgtatacagaatagcagaatgggcagacattacgaatgcacacggtgtggtgggcccaggtattgttagcggtttgaagcaggcggcagaagaagtaacaaaggaacctagaggccttttgatgttagcagaattgtcatgcaagggctccctatctactggagaatatactaagggtactgttgacattgcgaagagcgacaaagattttgttatcggctttattgctcaaagagacatgggtggaagagatgaaggttacgattggttgattatgacacccggtgtgggtttagatgacaagggagacgcattgggtcaacagtatagaaccgtggatgatgtggtctctacaggatctgacattattattgttggaagaggactatttgcaaagggaagggatgctaaggtagagggtgaacgttacagaaaagcaggctgggaagcatatttgagaagatgcggccagcaaaactaaaaaaatgtattataagtaaacctgcaggggaagagcgcccaatacgcaaaccgcctctccccgcgcgttggccgattcattaatgcagctggcacgacaggtttcccgactggaaagcgggcagtgagcgcaacgcaattaatacgcgtaccgctagccaggaagagtttgtagaaacgcaaaaaggccatccgtcaggatggccttctgcttagtttgatgcctggcagtttatggcgggcgtcctgcccgccaccctccgggccgttgcttcacaacgttcaaatccgctcccggcggatttgtcctactcaggagagcgttcaccgacaaacaacagataaaacgaaaggcccagtcttccgactgagcctttcgttttatttgatgcctggcagttccctactctcgcgttcatggagctccaaataatgattttattttgactgatagtgacctgttcgttgcaacaaattgataagcaatgcttttttataatgccaactttgtatagaaaagttgggccgaattcgagctcggtacggccagaatggcccggaccgacctgcagtgcagcgtgacccggtcgtgcccctctctagagataatgagcattgcatgtctaagttataaaaaattaccacatattttttttgtcacacttgtttgaagtgcagtttatctatctttatacatatatttaaactttactctacgaataatataatctatagtactacaataatatcagtgttttagagaatcatataaatgaacagttagacatggtctaaaggacaattgagtattttgacaacaggactctacagttttatctttttagtgtgcatgtgttctcctttttttttgcaaatagcttcacctatataatacttcatccattttattagtacatccatttagggtttagggttaatggtttttatagactaatttttttagtacatctattttattctattttagcctctaaattaagaaaactaaaactctattttagtttttttatttaataatttagatataaaatagaataaaataaagtgactaaaaattaaacaaataccctttaagaaattaaaaaaactaaggaaacatttttcttgtttcgagtagataatgccagcctgttaaacgccgtcgacgagtctaacggacaccaaccagcgaaccagcagcgtcgcgtcgggccaagcgaagcagacggcacggcatctctgtcgctgcctctggacccctctcgagagttccgctccaccgttggacttgctccgctgtcggcatccagaaattgcgtggcggagcggcagacgtgagccggcacggcaggcggcctcctcctcctctcacggcaccggcagctacgggggattcctttcccaccgctccttcgctttcccttcctcgcccgccgtaataaatagacaccccctccacaccctctttccccaacctcgtgttgttcggagcgcacacacacacaaccagatctcccccaaatccacccgtcggcacctccgcttcaaggtacgccgctcgtcctcccccccccccctctctaccttctctagatcggcgttccggtccatgcatggttagggcccggtagttctacttctgttcatgtttgtgttagatccgtgtttgtgttagatccgtgctgctagcgttcgtacacggatgcgacctgtacgtcagacacgttctgattgctaacttgccagtgtttctctttggggaatcctgggatggctctagccgttccgcagacgggatcgatttcatgattttttttgtttcgttgcatagggtttggtttgcccttttcctttatttcaatatatgccgtgcacttgtttgtcgggtcatcttttcatgcttttttttgtcttggttgtgatgatgtggtctggttgggcggtcgttctagatcggagtagaattctgtttcaaactacctggtggatttattaattttggatctgtatgtgtgtgccatacatattcatagttacgaattgaagatgatggatggaaatatcgatctaggataggtatacatgttgatgcgggttttactgatgcatatacagagatgctttttgttcgcttggttgtgatgatgtggtgtggttgggcggtcgttcattcgttctagatcggagtagaatactgtttcaaactacctggtgtatttattaattttggaactgtatgtgtgtgtcatacatcttcatagttacgagtttaagatggatggaaatatcgatctaggataggtatacatgttgatgtgggttttactgatgcatatacatgatggcatatgcagcatctattcatatgctctaaccttgagtacctatctattataataaacaagtatgttttataattattttgatcttgatatacttggatgatggcatatgcagcagctatatgtggatttttttagccctgccttcatacgctatttatttgcttggtactgtttcttttgtcgatgctcaccctgttgtttggtgttacttctgcaggtcgactttaacttagcctaggatccatgggcgagagcgtcaaggcaataaaattaaagatcctcgacatgttcctcgaccccgagtgcaccaagcaggtaagtttctgcttctacctttgatatatatataataattatcattaattagtagtaatataatatttcaaatatttttttcaaaataaaagaatgtagtatatagcaattgcttttctgtagtttataagtgtgtatattttaatttataacttttctaatatatgaccaaaacatggtgatgtgcaggacgacaactggcgcaaggacctcagcaccatgagccgcttctgcggcgaggccggcaacatgtgcctcagggacctctacaactacttcagcatgcccaaggaggaccgcatcagctccaaggacttatataacgccatgtaccataaaactaagctcctccaccccggcctccccgggaaggtgaagaaccaaatcgtcaaccacgccaaggacgtctggaagcgcaacgccaagctcatctaccgcaaccaaatcagcatgcccacatataagatcaccaccgcccccatccgcctccaaaataacatctacaaattaataaaaaataagaacaaatacataatcgacgtccagctctacagcaaggagtacagcaaggacagcggcaagggcacccacaggtacttcctcgtcgccgtcagggacagcagcaccaggatgatcttcgacaggatcatgagcaaggaccacatcgacagcagcaagagctacacccagggccagctccaaatcaagaaggaccaccagggcaagtggtactgcatcatcccctatacattccccacccacgaaaccgtcctcgaccccgacaaggtcatgggcgtcgccctcggggtggctaaggccgtctactgggctttcaacagcagctataaaagaggctgcatcgacggcggcgagatcgagcacttcaggaagatgatcagggcccggcgcgtcagcatccagaatcaaatcaaacacagcggcgacgcccgcaagggccacggcaggaagagggccctcaagcccatcgaaaccctcagcgagaaggagaagaacttccgcgacacaataaaccacaggtacgccaacaggatcgtcgaggccgctatcaagcagggctgcggcaccatccagatcgagaacctcgagggcatcgctgacaggaccggcagcaagttcctcaagaactggccctactacgacctccagaccaagatcgtcaataaagccaaggagcacggcatcaccgtcgtcgcaataaacccccagtatacatcccagcgctgcagcatgtgcggctacatcgagaaaaccaacaggagcagccaggccgtgttcgagtgcaagcagtgcggctacggcagccgcaccatctgcatcaactgcaggcacgtccaagtctccggcgacgtctgcgaggagtgcggcggcatcgtcaagaaggagaacgtcaacgccgactacaacgccgccaagaacatcagcaccccctacatcgaccagataataatggagaagtgcctcgagctcggcatcccctaccgctccatcacctgcaaggagtgcggccacatccaggctagcggcaacacctgcgaggtctgcggcagcaccaacatcctcaaaccaaagaagatccgcaaggcaaaaagcagggccgacccgaagaagaagcgcaaggtgggcagggctacgtgcgccaaggacatccaaaaagcagccgcggaggcggcactcgcctttcaggacgagacctgcgacaccaccaccaccaaccacggcctcgacatggaggagaccatggtcgaagccatctacacccccgagcagagcgagggcgccttctacatggacgaagagacaatgttcggcatgccaaccctcctcgacaacatggccgaaggcatgctgctgccgcccccgagcgtccagtggaaccacaactacgacggcgaaggcgacggggatgtgtccctgtggagctactaggtaccgtcatgggtcgtttaagctgccgatgtgcctgcgtcgtctggtgccctctctccatatggaggttgtcaaagtatctgctgttcgtgtcatgagtcgtgtcagtgttggtttaataatggaccggttgtgttgtgtgtgcgtactacccagaactatgacaaatcatgaataagtttgatgtttgaaattaaagcctgtgctcattatgttctgtctttcagttgtctcctaatatttgcctgcaggtactggctatctaccgtttcttacttaggaggtgtttgaatgcactaaaactaatagttagtggctaaaattagttaaaacatccaaacaccatagctaatagttgaactattagctatttttggaaaattagttaatagtgaggtagttatttgttagctagctaattcaactaacaatttttagccaactaacaattagtttcagtgcattcaaacacccccttaatgttaacgtggttctatctaccgtctcctaatatatggttgattgttcggtttgttgctatgctattgggttctgattgctgctagttcttgctgaatccagaagttctcgtagtatagctcagattcatattatttatttgagtgataagtgatccaggttattactatgttagctaggttttttttacaaggataaattatctgtgatcataattcttatgaaagctttatgtttcctggaggcagtggcatgcaatgcatgacagcaacttgatcacaccagctgaggtagatacggtaacaaggttcttaaatctgttcaccaaatcattggagaacacacatacacattcttgccagtcttggttagagaaatttcatgacaaaatgccaaagctgtcttgactcttcacttttggccatgagtcgtgacttaacggcaaacgctaattagtcactaggcccaggaaacactaactaagccctagcttatcctagcgcaacctagttaggtcttccccaagtttgtacaaaaaagttgaacgagaaacgtaaaatgatataaatatcaatatattaaattagattttgcataaaaaacagactacataatactgtaaaacacaacatatgcagtcactatgaaccaactacttagatggtattagtgacctgtagttaacgcggccgcgatatcccctatagtgagtcgtattacatggtcatagctgtttcctggcagctctggcccgtgtctcaaaatctctgatgttacattgcacaagataaaaatatatcatcatgaacaataaaactgtctgcttacataaacagtaatacaaggggtgttatgagccatattcaacgggaaacgtcgaggccgcgattaaattccaacatggatgctgatttatatgggtataaatgggctcgcgataatgtcgggcaatcaggtgcgacaatctatcgcttgtatgggaagcccgatgcgccagagttgtttctgaaacatggcaaaggtagcgttgccaatgatgttacagatgagatggtcagactaaactggctgacggaatttatgcctcttccgaccatcaagcattttatccgtactcctgatgatgcatggttactcaccactgcgatccccggaaaaacagcattccaggtattagaagaatatcctgattcaggtgaaaatattgttgatgcgctggcagtgttcctgcgccggttgcattcgattcctgtttgtaattgtccttttaacagcgatcgcgtatttcgtctcgctcaggcgcaatcacgaatgaataacggtttggttgatgcgagtgattttgatgacgagcgtaatggctggcctgttgaacaagtctggaaagaaatgcataaacttttgccattctcaccggattcagtcgtcactcatggtgatttctcacttgataaccttatttttgacgaggggaaattaataggttgtattgatgttggacgagtcggaatcgcagaccgataccaggatcttgccatcctatggaactgcctcggtgagttttctccttcattacagaaacggctttttcaaaaatatggtattgataatcctgatatgaataaattgcagtttcatttgatgctcgatgagtttttctaatcagaattggttaattggttgtaacactggcagagcattacgctgacttgacgggacggcgcaagctcatgaccaaaatcccttaacgtgagttacgcgtcgttccactgagcgtcagaccccgtagaaaagatcaaaggatcttcttgagatcctttttttctgcgcgtaatctgctgcttgcaaacaaaaaaaccaccgctaccagcggtggtttgtttgccggatcaagagctaccaactctttttccgaaggtaactggcttcagcagagcgcagataccaaatactgttcttctagtgtagccgtagttaggccaccacttcaagaactctgtagcaccgcctacatacctcgctctgctaatcctgttaccagtggctgctgccagtggcgataagtcgtgtcttaccgggttggactcaagacgatagttaccggataaggcgcagcggtcgggctgaacggggggttcgtgcacacagcccagcttggagcgaacgacctacaccgaactgagatacctacagcgtgagctatgagaaagcgccacgcttcccgaagggagaaaggcggacaggtatccggtaagcggcagggtcggaacaggagagcgcacgagggagcttccagggggaaacgcctggtatctttatagtcctgtcgggtttcgccacctctgacttgagcgtcgatttttgtgatgctcgtcaggggggcggagcctatggaaaaacgccagcaacgcggcctttttacggttcctggccttttgctggccttttgctcacatgttctttcctgcgttatcccctgattctgtggataaccgtattaccgcctttgagtgagctgataccgctcgccgcagccgaacgaccgagcgcagcgagtcagtgagcgaggaagccctgcagggtgccacctgggtccttttcatcacgtgctataaaaataattataatttaaattttttaatataaatatataaattaaaaatagaaagtaaaaaaagaaattaaagaaaaaatagtttttgttttccgaagatgtaaaagactctagggggatcgccaacaaatactaccttttatcttgctcttcctgctctcaggtattaatgccgaattgtttcatcttgtctgtgtagaagaccacacacgaaaatcctgtgattttacattttacttatcgttaatcgaatgtatatctatttaatctgcttttcttgtctaataaatatatatgtaaagtacgctttttgttgaaattttttaaacctttgtttatttttttttcttcattccgtaactcttctaccttctttatttactttctaaaatccaaatacaaaacataaaaataaataaacacagagtaaattcccaaattattccatcattaaaagatacgaggcgcgtgtaagttacaggcaagcgatccgtcctaag

SEQ ID NO: 34 - DNA, 9507 bp, Artificial sequence
  Synthetic
aaaccattattatcatgacattaacctataaaaataggcgtatcacgaggccctttcgtctcgcgcgtttcggtgatgacggtgaaaacctctgacacatgcagctcccggagacggtcacagcttgtctgtaagcggatgccgggagcagacaagcccgtcagggcgcgtcagcgggtgttggcgggtgtcggggctggcttaactatgcggcatcagagcagattgtactgagagtgcaccataccacagcttttcaattcaattcatcattttttttttattcttttttttgatttcggtttctttgaaatttttttgattcggtaatctccgaacagaaggaagaacgaaggaaggagcacagacttagattggtatatatacgcatatgtagtgttgaagaaacatgaaattgcccagtattcttaacccaactgcacagaacaaaaacctgcaggaaacgaagataaatcatgtcgaaagctacatataaggaacgtgctgctactcatcctagtcctgttgctgccaagctatttaatatcatgcacgaaaagcaaacaaacttgtgtgcttcattggatgttcgtaccaccaaggaattactggagttagttgaagcattaggtcccaaaatttgtttactaaaaacacatgtggatatcttgactgatttttccatggagggcacagttaagccgctaaaggcattatccgccaagtacaattttttactcttcgaagacagaaaatttgctgacattggtaatacagtcaaattgcagtactctgcgggtgtatacagaatagcagaatgggcagacattacgaatgcacacggtgtggtgggcccaggtattgttagcggtttgaagcaggcggcagaagaagtaacaaaggaacctagaggccttttgatgttagcagaattgtcatgcaagggctccctatctactggagaatatactaagggtactgttgacattgcgaagagcgacaaagattttgttatcggctttattgctcaaagagacatgggtggaagagatgaaggttacgattggttgattatgacacccggtgtgggtttagatgacaagggagacgcattgggtcaacagtatagaaccgtggatgatgtggtctctacaggatctgacattattattgttggaagaggactatttgcaaagggaagggatgctaaggtagagggtgaacgttacagaaaagcaggctgggaagcatatttgagaagatgcggccagcaaaactaaaaaaatgtattataagtaaacctgcaggggaagagcgcccaatacgcaaaccgcctctccccgcgcgttggccgattcattaatgcagctggcacgacaggtttcccgactggaaagcgggcagtgagcgcaacgcaattaatacgcgtaccgctagccaggaagagtttgtagaaacgcaaaaaggccatccgtcaggatggccttctgcttagtttgatgcctggcagtttatggcgggcgtcctgcccgccaccctccgggccgttgcttcacaacgttcaaatccgctcccggcggatttgtcctactcaggagagcgttcaccgacaaacaacagataaaacgaaaggcccagtcttccgactgagcctttcgttttatttgatgcctggcagttccctactctcgcgttcatggagctccaaataatgattttattttgactgatagtgacctgttcgttgcaacaaattgataagcaatgcttttttataatgccaactttgtatagaaaagttgggccgaattcgagctcggtacggccagaatggcccggaccgacctgcagtgcagcgtgacccggtcgtgcccctctctagagataatgagcattgcatgtctaagttataaaaaattaccacatattttttttgtcacacttgtttgaagtgcagtttatctatctttatacatatatttaaactttactctacgaataatataatctatagtactacaataatatcagtgttttagagaatcatataaatgaacagttagacatggtctaaaggacaattgagtattttgacaacaggactctacagttttatctttttagtgtgcatgtgttctcctttttttttgcaaatagcttcacctatataatacttcatccattttattagtacatccatttagggtttagggttaatggtttttatagactaatttttttagtacatctattttattctattttagcctctaaattaagaaaactaaaactctattttagtttttttatttaataatttagatataaaatagaataaaataaagtgactaaaaattaaacaaataccctttaagaaattaaaaaaactaaggaaacatttttcttgtttcgagtagataatgccagcctgttaaacgccgtcgacgagtctaacggacaccaaccagcgaaccagcagcgtcgcgtcgggccaagcgaagcagacggcacggcatctctgtcgctgcctctggacccctctcgagagttccgctccaccgttggacttgctccgctgtcggcatccagaaattgcgtggcggagcggcagacgtgagccggcacggcaggcggcctcctcctcctctcacggcaccggcagctacgggggattcctttcccaccgctccttcgctttcccttcctcgcccgccgtaataaatagacaccccctccacaccctctttccccaacctcgtgttgttcggagcgcacacacacacaaccagatctcccccaaatccacccgtcggcacctccgcttcaaggtacgccgctcgtcctcccccccccccctctctaccttctctagatcggcgttccggtccatgcatggttagggcccggtagttctacttctgttcatgtttgtgttagatccgtgtttgtgttagatccgtgctgctagcgttcgtacacggatgcgacctgtacgtcagacacgttctgattgctaacttgccagtgtttctctttggggaatcctgggatggctctagccgttccgcagacgggatcgatttcatgattttttttgtttcgttgcatagggtttggtttgcccttttcctttatttcaatatatgccgtgcacttgtttgtcgggtcatcttttcatgcttttttttgtcttggttgtgatgatgtggtctggttgggcggtcgttctagatcggagtagaattctgtttcaaactacctggtggatttattaattttggatctgtatgtgtgtgccatacatattcatagttacgaattgaagatgatggatggaaatatcgatctaggataggtatacatgttgatgcgggttttactgatgcatatacagagatgctttttgttcgcttggttgtgatgatgtggtgtggttgggcggtcgttcattcgttctagatcggagtagaatactgtttcaaactacctggtgtatttattaattttggaactgtatgtgtgtgtcatacatcttcatagttacgagtttaagatggatggaaatatcgatctaggataggtatacatgttgatgtgggttttactgatgcatatacatgatggcatatgcagcatctattcatatgctctaaccttgagtacctatctattataataaacaagtatgttttataattattttgatcttgatatacttggatgatggcatatgcagcagctatatgtggatttttttagccctgccttcatacgctatttatttgcttggtactgtttcttttgtcgatgctcaccctgttgtttggtgttacttctgcaggtcgactttaacttagcctaggatccatggcaccgaagaagaagcgcaaggtgatgggcgagagcgtcaaggcaataaaattaaagatcctcgacatgttcctcgaccccgagtgcaccaagcaggtaagtttctgcttctacctttgatatatatataataattatcattaattagtagtaatataatatttcaaatatttttttcaaaataaaagaatgtagtatatagcaattgcttttctgtagtttataagtgtgtatattttaatttataacttttctaatatatgaccaaaacatggtgatgtgcaggacgacaactggcgcaaggacctcagcaccatgagccgcttctgcggcgaggccggcaacatgtgcctcagggacctctacaactacttcagcatgcccaaggaggaccgcatcagctccaaggacttatataacgccatgtaccataaaactaagctcctccaccccggcctccccgggaaggtgaagaaccaaatcgtcaaccacgccaaggacgtctggaagcgcaacgccaagctcatctaccgcaaccaaatcagcatgcccacatataagatcaccaccgcccccatccgcctccaaaataacatctacaaattaataaaaaataagaacaaatacataatcgacgtccagctctacagcaaggagtacagcaaggacagcggcaagggcacccacaggtacttcctcgtcgccgtcagggacagcagcaccaggatgatcttcgacaggatcatgagcaaggaccacatcgacagcagcaagagctacacccagggccagctccaaatcaagaaggaccaccagggcaagtggtactgcatcatcccctatacattccccacccacgaaaccgtcctcgaccccgacaaggtcatgggcgtcgccctcggggtggctaaggccgtctactgggctttcaacagcagctataaaagaggctgcatcgacggcggcgagatcgagcacttcaggaagatgatcagggcccggcgcgtcagcatccagaatcaaatcaaacacagcggcgacgcccgcaagggccacggcaggaagagggccctcaagcccatcgaaaccctcagcgagaaggagaagaacttccgcgacacaataaaccacaggtacgccaacaggatcgtcgaggccgctatcaagcagggctgcggcaccatccagatcgagaacctcgagggcatcgctgacaggaccggcagcaagttcctcaagaactggccctactacgacctccagaccaagatcgtcaataaagccaaggagcacggcatcaccgtcgtcgcaataaacccccagtatacatcccagcgctgcagcatgtgcggctacatcgagaaaaccaacaggagcagccaggccgtgttcgagtgcaagcagtgcggctacggcagccgcaccatctgcatcaactgcaggcacgtccaagtctccggcgacgtctgcgaggagtgcggcggcatcgtcaagaaggagaacgtcaacgccgactacaacgccgccaagaacatcagcaccccctacatcgaccagataataatggagaagtgcctcgagctcggcatcccctaccgctccatcacctgcaaggagtgcggccacatccaggctagcggcaacacctgcgaggtctgcggcagcaccaacatcctcaaaccaaagaagatccgcaaggcaaaaagcagggccgacccgaagaagaagcgcaaggtgggcagggctacgtgcgccaaggacatccaaaaagcagccgcggaggcggcactcgcctttcaggacgagacctgcgacaccaccaccaccaaccacggcctcgacatggaggagaccatggtcgaagccatctacacccccgagcagagcgagggcgccttctacatggacgaagagacaatgttcggcatgccaaccctcctcgacaacatggccgaaggcatgctgctgccgcccccgagcgtccagtggaaccacaactacgacggcgaaggcgacggggatgtgtccctgtggagctactaggtaccgtcatgggtcgtttaagctgccgatgtgcctgcgtcgtctggtgccctctctccatatggaggttgtcaaagtatctgctgttcgtgtcatgagtcgtgtcagtgttggtttaataatggaccggttgtgttgtgtgtgcgtactacccagaactatgacaaatcatgaataagtttgatgtttgaaattaaagcctgtgctcattatgttctgtctttcagttgtctcctaatatttgcctgcaggtactggctatctaccgtttcttacttaggaggtgtttgaatgcactaaaactaatagttagtggctaaaattagttaaaacatccaaacaccatagctaatagttgaactattagctatttttggaaaattagttaatagtgaggtagttatttgttagctagctaattcaactaacaatttttagccaactaacaattagtttcagtgcattcaaacacccccttaatgttaacgtggttctatctaccgtctcctaatatatggttgattgttcggtttgttgctatgctattgggttctgattgctgctagttcttgctgaatccagaagttctcgtagtatagctcagattcatattatttatttgagtgataagtgatccaggttattactatgttagctaggttttttttacaaggataaattatctgtgatcataattcttatgaaagctttatgtttcctggaggcagtggcatgcaatgcatgacagcaacttgatcacaccagctgaggtagatacggtaacaaggttcttaaatctgttcaccaaatcattggagaacacacatacacattcttgccagtcttggttagagaaatttcatgacaaaatgccaaagctgtcttgactcttcacttttggccatgagtcgtgacttaacggcaaacgctaattagtcactaggcccaggaaacactaactaagccctagcttatcctagcgcaacctagttaggtcttccccaagtttgtacaaaaaagttgaacgagaaacgtaaaatgatataaatatcaatatattaaattagattttgcataaaaaacagactacataatactgtaaaacacaacatatgcagtcactatgaaccaactacttagatggtattagtgacctgtagttaacgcggccgcgatatcccctatagtgagtcgtattacatggtcatagctgtttcctggcagctctggcccgtgtctcaaaatctctgatgttacattgcacaagataaaaatatatcatcatgaacaataaaactgtctgcttacataaacagtaatacaaggggtgttatgagccatattcaacgggaaacgtcgaggccgcgattaaattccaacatggatgctgatttatatgggtataaatgggctcgcgataatgtcgggcaatcaggtgcgacaatctatcgcttgtatgggaagcccgatgcgccagagttgtttctgaaacatggcaaaggtagcgttgccaatgatgttacagatgagatggtcagactaaactggctgacggaatttatgcctcttccgaccatcaagcattttatccgtactcctgatgatgcatggttactcaccactgcgatccccggaaaaacagcattccaggtattagaagaatatcctgattcaggtgaaaatattgttgatgcgctggcagtgttcctgcgccggttgcattcgattcctgtttgtaattgtccttttaacagcgatcgcgtatttcgtctcgctcaggcgcaatcacgaatgaataacggtttggttgatgcgagtgattttgatgacgagcgtaatggctggcctgttgaacaagtctggaaagaaatgcataaacttttgccattctcaccggattcagtcgtcactcatggtgatttctcacttgataaccttatttttgacgaggggaaattaataggttgtattgatgttggacgagtcggaatcgcagaccgataccaggatcttgccatcctatggaactgcctcggtgagttttctccttcattacagaaacggctttttcaaaaatatggtattgataatcctgatatgaataaattgcagtttcatttgatgctcgatgagtttttctaatcagaattggttaattggttgtaacactggcagagcattacgctgacttgacgggacggcgcaagctcatgaccaaaatcccttaacgtgagttacgcgtcgttccactgagcgtcagaccccgtagaaaagatcaaaggatcttcttgagatcctttttttctgcgcgtaatctgctgcttgcaaacaaaaaaaccaccgctaccagcggtggtttgtttgccggatcaagagctaccaactctttttccgaaggtaactggcttcagcagagcgcagataccaaatactgttcttctagtgtagccgtagttaggccaccacttcaagaactctgtagcaccgcctacatacctcgctctgctaatcctgttaccagtggctgctgccagtggcgataagtcgtgtcttaccgggttggactcaagacgatagttaccggataaggcgcagcggtcgggctgaacggggggttcgtgcacacagcccagcttggagcgaacgacctacaccgaactgagatacctacagcgtgagctatgagaaagcgccacgcttcccgaagggagaaaggcggacaggtatccggtaagcggcagggtcggaacaggagagcgcacgagggagcttccagggggaaacgcctggtatctttatagtcctgtcgggtttcgccacctctgacttgagcgtcgatttttgtgatgctcgtcaggggggcggagcctatggaaaaacgccagcaacgcggcctttttacggttcctggccttttgctggccttttgctcacatgttctttcctgcgttatcccctgattctgtggataaccgtattaccgcctttgagtgagctgataccgctcgccgcagccgaacgaccgagcgcagcgagtcagtgagcgaggaagccctgcagggtgccacctgggtccttttcatcacgtgctataaaaataattataatttaaattttttaatataaatatataaattaaaaatagaaagtaaaaaaagaaattaaagaaaaaatagtttttgttttccgaagatgtaaaagactctagggggatcgccaacaaatactaccttttatcttgctcttcctgctctcaggtattaatgccgaattgtttcatcttgtctgtgtagaagaccacacacgaaaatcctgtgattttacattttacttatcgttaatcgaatgtatatctatttaatctgcttttcttgtctaataaatatatatgtaaagtacgctttttgttgaaattttttaaacctttgtttatttttttttcttcattccgtaactcttctaccttctttatttactttctaaaatccaaatacaaaacataaaaataaataaacacagagtaaattcccaaattattccatcattaaaagatacgaggcgcgtgtaagttacaggcaagcgatccgtcctaag

SEQ ID NO: 35 - DNA, 9504 bp, Artificial sequence
  Synthetic
aaaccattattatcatgacattaacctataaaaataggcgtatcacgaggccctttcgtctcgcgcgtttcggtgatgacggtgaaaacctctgacacatgcagctcccggagacggtcacagcttgtctgtaagcggatgccgggagcagacaagcccgtcagggcgcgtcagcgggtgttggcgggtgtcggggctggcttaactatgcggcatcagagcagattgtactgagagtgcaccataccacagcttttcaattcaattcatcattttttttttattcttttttttgatttcggtttctttgaaatttttttgattcggtaatctccgaacagaaggaagaacgaaggaaggagcacagacttagattggtatatatacgcatatgtagtgttgaagaaacatgaaattgcccagtattcttaacccaactgcacagaacaaaaacctgcaggaaacgaagataaatcatgtcgaaagctacatataaggaacgtgctgctactcatcctagtcctgttgctgccaagctatttaatatcatgcacgaaaagcaaacaaacttgtgtgcttcattggatgttcgtaccaccaaggaattactggagttagttgaagcattaggtcccaaaatttgtttactaaaaacacatgtggatatcttgactgatttttccatggagggcacagttaagccgctaaaggcattatccgccaagtacaattttttactcttcgaagacagaaaatttgctgacattggtaatacagtcaaattgcagtactctgcgggtgtatacagaatagcagaatgggcagacattacgaatgcacacggtgtggtgggcccaggtattgttagcggtttgaagcaggcggcagaagaagtaacaaaggaacctagaggccttttgatgttagcagaattgtcatgcaagggctccctatctactggagaatatactaagggtactgttgacattgcgaagagcgacaaagattttgttatcggctttattgctcaaagagacatgggtggaagagatgaaggttacgattggttgattatgacacccggtgtgggtttagatgacaagggagacgcattgggtcaacagtatagaaccgtggatgatgtggtctctacaggatctgacattattattgttggaagaggactatttgcaaagggaagggatgctaaggtagagggtgaacgttacagaaaagcaggctgggaagcatatttgagaagatgcggccagcaaaactaaaaaaatgtattataagtaaacctgcaggggaagagcgcccaatacgcaaaccgcctctccccgcgcgttggccgattcattaatgcagctggcacgacaggtttcccgactggaaagcgggcagtgagcgcaacgcaattaatacgcgtaccgctagccaggaagagtttgtagaaacgcaaaaaggccatccgtcaggatggccttctgcttagtttgatgcctggcagtttatggcgggcgtcctgcccgccaccctccgggccgttgcttcacaacgttcaaatccgctcccggcggatttgtcctactcaggagagcgttcaccgacaaacaacagataaaacgaaaggcccagtcttccgactgagcctttcgttttatttgatgcctggcagttccctactctcgcgttcatggagctccaaataatgattttattttgactgatagtgacctgttcgttgcaacaaattgataagcaatgcttttttataatgccaactttgtatagaaaagttgggccgaattcgagctcggtacggccagaatggcccggaccgacctgcagtgcagcgtgacccggtcgtgcccctctctagagataatgagcattgcatgtctaagttataaaaaattaccacatattttttttgtcacacttgtttgaagtgcagtttatctatctttatacatatatttaaactttactctacgaataatataatctatagtactacaataatatcagtgttttagagaatcatataaatgaacagttagacatggtctaaaggacaattgagtattttgacaacaggactctacagttttatctttttagtgtgcatgtgttctcctttttttttgcaaatagcttcacctatataatacttcatccattttattagtacatccatttagggtttagggttaatggtttttatagactaatttttttagtacatctattttattctattttagcctctaaattaagaaaactaaaactctattttagtttttttatttaataatttagatataaaatagaataaaataaagtgactaaaaattaaacaaataccctttaagaaattaaaaaaactaaggaaacatttttcttgtttcgagtagataatgccagcctgttaaacgccgtcgacgagtctaacggacaccaaccagcgaaccagcagcgtcgcgtcgggccaagcgaagcagacggcacggcatctctgtcgctgcctctggacccctctcgagagttccgctccaccgttggacttgctccgctgtcggcatccagaaattgcgtggcggagcggcagacgtgagccggcacggcaggcggcctcctcctcctctcacggcaccggcagctacgggggattcctttcccaccgctccttcgctttcccttcctcgcccgccgtaataaatagacaccccctccacaccctctttccccaacctcgtgttgttcggagcgcacacacacacaaccagatctcccccaaatccacccgtcggcacctccgcttcaaggtacgccgctcgtcctcccccccccccctctctaccttctctagatcggcgttccggtccatgcatggttagggcccggtagttctacttctgttcatgtttgtgttagatccgtgtttgtgttagatccgtgctgctagcgttcgtacacggatgcgacctgtacgtcagacacgttctgattgctaacttgccagtgtttctctttggggaatcctgggatggctctagccgttccgcagacgggatcgatttcatgattttttttgtttcgttgcatagggtttggtttgcccttttcctttatttcaatatatgccgtgcacttgtttgtcgggtcatcttttcatgcttttttttgtcttggttgtgatgatgtggtctggttgggcggtcgttctagatcggagtagaattctgtttcaaactacctggtggatttattaattttggatctgtatgtgtgtgccatacatattcatagttacgaattgaagatgatggatggaaatatcgatctaggataggtatacatgttgatgcgggttttactgatgcatatacagagatgctttttgttcgcttggttgtgatgatgtggtgtggttgggcggtcgttcattcgttctagatcggagtagaatactgtttcaaactacctggtgtatttattaattttggaactgtatgtgtgtgtcatacatcttcatagttacgagtttaagatggatggaaatatcgatctaggataggtatacatgttgatgtgggttttactgatgcatatacatgatggcatatgcagcatctattcatatgctctaaccttgagtacctatctattataataaacaagtatgttttataattattttgatcttgatatacttggatgatggcatatgcagcagctatatgtggatttttttagccctgccttcatacgctatttatttgcttggtactgtttcttttgtcgatgctcaccctgttgtttggtgttacttctgcaggtcgactttaacttagcctaggatccatgacgtgcgccaaggacatccaaaaagcagccgcggaggcggcactcgcctttcaggacgagacctgcgacaccaccaccaccaaccacggcctcgacatggaggagaccatggtcgaagccatctacacccccgagcagagcgagggcgccttctacatggacgaagagacaatgttcggcatgccaaccctcctcgacaacatggccgaaggcatgctgctgccgcccccgagcgtccagtggaaccacaactacgacggcgaaggcgacggggatgtgtccctgtggagctacggcagggctccgaagaagaagcgcaaggtgatgggcgagagcgtcaaggcaataaaattaaagatcctcgacatgttcctcgaccccgagtgcaccaagcaggtaagtttctgcttctacctttgatatatatataataattatcattaattagtagtaatataatatttcaaatatttttttcaaaataaaagaatgtagtatatagcaattgcttttctgtagtttataagtgtgtatattttaatttataacttttctaatatatgaccaaaacatggtgatgtgcaggacgacaactggcgcaaggacctcagcaccatgagccgcttctgcggcgaggccggcaacatgtgcctcagggacctctacaactacttcagcatgcccaaggaggaccgcatcagctccaaggacttatataacgccatgtaccataaaactaagctcctccaccccggcctccccgggaaggtgaagaaccaaatcgtcaaccacgccaaggacgtctggaagcgcaacgccaagctcatctaccgcaaccaaatcagcatgcccacatataagatcaccaccgcccccatccgcctccaaaataacatctacaaattaataaaaaataagaacaaatacataatcgacgtccagctctacagcaaggagtacagcaaggacagcggcaagggcacccacaggtacttcctcgtcgccgtcagggacagcagcaccaggatgatcttcgacaggatcatgagcaaggaccacatcgacagcagcaagagctacacccagggccagctccaaatcaagaaggaccaccagggcaagtggtactgcatcatcccctatacattccccacccacgaaaccgtcctcgaccccgacaaggtcatgggcgtcgccctcggggtggctaaggccgtctactgggctttcaacagcagctataaaagaggctgcatcgacggcggcgagatcgagcacttcaggaagatgatcagggcccggcgcgtcagcatccagaatcaaatcaaacacagcggcgacgcccgcaagggccacggcaggaagagggccctcaagcccatcgaaaccctcagcgagaaggagaagaacttccgcgacacaataaaccacaggtacgccaacaggatcgtcgaggccgctatcaagcagggctgcggcaccatccagatcgagaacctcgagggcatcgctgacaggaccggcagcaagttcctcaagaactggccctactacgacctccagaccaagatcgtcaataaagccaaggagcacggcatcaccgtcgtcgcaataaacccccagtatacatcccagcgctgcagcatgtgcggctacatcgagaaaaccaacaggagcagccaggccgtgttcgagtgcaagcagtgcggctacggcagccgcaccatctgcatcaactgcaggcacgtccaagtctccggcgacgtctgcgaggagtgcggcggcatcgtcaagaaggagaacgtcaacgccgactacaacgccgccaagaacatcagcaccccctacatcgaccagataataatggagaagtgcctcgagctcggcatcccctaccgctccatcacctgcaaggagtgcggccacatccaggctagcggcaacacctgcgaggtctgcggcagcaccaacatcctcaaaccaaagaagatccgcaaggcaaaaagcagggccgacccgaagaagaagcgcaaggtgtaggtaccgtcatgggtcgtttaagctgccgatgtgcctgcgtcgtctggtgccctctctccatatggaggttgtcaaagtatctgctgttcgtgtcatgagtcgtgtcagtgttggtttaataatggaccggttgtgttgtgtgtgcgtactacccagaactatgacaaatcatgaataagtttgatgtttgaaattaaagcctgtgctcattatgttctgtctttcagttgtctcctaatatttgcctgcaggtactggctatctaccgtttcttacttaggaggtgtttgaatgcactaaaactaatagttagtggctaaaattagttaaaacatccaaacaccatagctaatagttgaactattagctatttttggaaaattagttaatagtgaggtagttatttgttagctagctaattcaactaacaatttttagccaactaacaattagtttcagtgcattcaaacacccccttaatgttaacgtggttctatctaccgtctcctaatatatggttgattgttcggtttgttgctatgctattgggttctgattgctgctagttcttgctgaatccagaagttctcgtagtatagctcagattcatattatttatttgagtgataagtgatccaggttattactatgttagctaggttttttttacaaggataaattatctgtgatcataattcttatgaaagctttatgtttcctggaggcagtggcatgcaatgcatgacagcaacttgatcacaccagctgaggtagatacggtaacaaggttcttaaatctgttcaccaaatcattggagaacacacatacacattcttgccagtcttggttagagaaatttcatgacaaaatgccaaagctgtcttgactcttcacttttggccatgagtcgtgacttaacggcaaacgctaattagtcactaggcccaggaaacactaactaagccctagcttatcctagcgcaacctagttaggtcttccccaagtttgtacaaaaaagttgaacgagaaacgtaaaatgatataaatatcaatatattaaattagattttgcataaaaaacagactacataatactgtaaaacacaacatatgcagtcactatgaaccaactacttagatggtattagtgacctgtagttaacgcggccgcgatatcccctatagtgagtcgtattacatggtcatagctgtttcctggcagctctggcccgtgtctcaaaatctctgatgttacattgcacaagataaaaatatatcatcatgaacaataaaactgtctgcttacataaacagtaatacaaggggtgttatgagccatattcaacgggaaacgtcgaggccgcgattaaattccaacatggatgctgatttatatgggtataaatgggctcgcgataatgtcgggcaatcaggtgcgacaatctatcgcttgtatgggaagcccgatgcgccagagttgtttctgaaacatggcaaaggtagcgttgccaatgatgttacagatgagatggtcagactaaactggctgacggaatttatgcctcttccgaccatcaagcattttatccgtactcctgatgatgcatggttactcaccactgcgatccccggaaaaacagcattccaggtattagaagaatatcctgattcaggtgaaaatattgttgatgcgctggcagtgttcctgcgccggttgcattcgattcctgtttgtaattgtccttttaacagcgatcgcgtatttcgtctcgctcaggcgcaatcacgaatgaataacggtttggttgatgcgagtgattttgatgacgagcgtaatggctggcctgttgaacaagtctggaaagaaatgcataaacttttgccattctcaccggattcagtcgtcactcatggtgatttctcacttgataaccttatttttgacgaggggaaattaataggttgtattgatgttggacgagtcggaatcgcagaccgataccaggatcttgccatcctatggaactgcctcggtgagttttctccttcattacagaaacggctttttcaaaaatatggtattgataatcctgatatgaataaattgcagtttcatttgatgctcgatgagtttttctaatcagaattggttaattggttgtaacactggcagagcattacgctgacttgacgggacggcgcaagctcatgaccaaaatcccttaacgtgagttacgcgtcgttccactgagcgtcagaccccgtagaaaagatcaaaggatcttcttgagatcctttttttctgcgcgtaatctgctgcttgcaaacaaaaaaaccaccgctaccagcggtggtttgtttgccggatcaagagctaccaactctttttccgaaggtaactggcttcagcagagcgcagataccaaatactgttcttctagtgtagccgtagttaggccaccacttcaagaactctgtagcaccgcctacatacctcgctctgctaatcctgttaccagtggctgctgccagtggcgataagtcgtgtcttaccgggttggactcaagacgatagttaccggataaggcgcagcggtcgggctgaacggggggttcgtgcacacagcccagcttggagcgaacgacctacaccgaactgagatacctacagcgtgagctatgagaaagcgccacgcttcccgaagggagaaaggcggacaggtatccggtaagcggcagggtcggaacaggagagcgcacgagggagcttccagggggaaacgcctggtatctttatagtcctgtcgggtttcgccacctctgacttgagcgtcgatttttgtgatgctcgtcaggggggcggagcctatggaaaaacgccagcaacgcggcctttttacggttcctggccttttgctggccttttgctcacatgttctttcctgcgttatcccctgattctgtggataaccgtattaccgcctttgagtgagctgataccgctcgccgcagccgaacgaccgagcgcagcgagtcagtgagcgaggaagccctgcagggtgccacctgggtccttttcatcacgtgctataaaaataattataatttaaattttttaatataaatatataaattaaaaatagaaagtaaaaaaagaaattaaagaaaaaatagtttttgttttccgaagatgtaaaagactctagggggatcgccaacaaatactaccttttatcttgctcttcctgctctcaggtattaatgccgaattgtttcatcttgtctgtgtagaagaccacacacgaaaatcctgtgattttacattttacttatcgttaatcgaatgtatatctatttaatctgcttttcttgtctaataaatatatatgtaaagtacgctttttgttgaaattttttaaacctttgtttatttttttttcttcattccgtaactcttctaccttctttatttactttctaaaatccaaatacaaaacataaaaataaataaacacagagtaaattcccaaattattccatcattaaaagatacgaggcgcgtgtaagttacaggcaagcgatccgtcctaag

SEQ ID NO: 36 - DNA, 4443 bp, Artificial sequence
  Synthetic
tcacgacgttgtaaaacgacggccagtgaattgtaatacgactcactatagggcgaattgggtaccgggccccccctcgaggtcgacggtatcgataagctttgagagtacaatgatgaacctagattaatcaatgccaaagtctgaaaaatgcaccctcagtctatgatccagaaaatcaagattgcttgaggccctgttcggttgttccggattagagccccggattaattcctagccggattacttctctaatttatatagattttgatgagctggaatgaatcctggcttattccggtacaaccgaacaggccctgaaggataccagtaatcgctgagctaaattggcatgctgtcagagtgtcagtattgcagcaaggtagtgagataaccggcatcatggtgccagtttgatggcaccattagggttagagatggtggccatgggcgcatgtcctggccaactttgtatgatatatggcagggtgaataggaaagtaaaattgtattgtaaaaagggatttcttctgtttgttagcgcatgtacaaggaatgcaagttttgagcgagggggcatcaaagatctggctgtgtttccagctgtttttgttagccccatcgaatccttgacataatgatcccgcttaaataagcaacctcgcttgtatagttccttgtgctctaacacacgatgatgataagtcgtaaaatagtggtgtccaaagaatttccaggcccagttgtaaaagctaaaatgctattcgaatttctactagcagtaagtcgtgtttagaaattatttttttatataccttttttccttctatgtacagtaggacacagtgtcagcgccgcgttgacggagaatatttgcaaaaaagtaaaagagaaagtcatagcggcgtatgtgccaaaaacttcgtcacagagagggccataagaaacatggcccacggcccaatacgaagcaccgcgacgaagcccaaacagcagtccgtaggtggagcaaagcgctgggtaatacgcaaacgttttgtcccaccttgactaatcacaagagtggagcgtaccttataaaccgagccgcaagcaccgaattttcatgtacagtttaagcactacgttttagagctagaaatagcaagttaaaataaggctagtccgttatcaacttgaaaaagtggcaccgagtcggtgctttttttttgcggccgcgaattcctgcagggccctcttgtcggaccagttgcccaccacgttggtgagctcggtgaggcccttcattgagaggaaggaggtcatgaggtgcctaccgatgtgggacttggggccgttcttgatggcgaagatggagtagggggcgttcttcttgagggccttgttgtaggacctcacgaggttgtccttgaggagctggtactcctgcttgttggaggaggagttgccggtcctgttcaccctcttgagcacgggctctgagttcctgaggaactcgtcgaggtacacgagggggtcgatcctgccgcgagcggagaagaagtagatgtgcctggacacggaggtcttggtctcggtcacgaggcactggatgatcacgccgaggtacttgttctgactagttctagagcggccgccaccgcggtggagctccagcttttgttccctttagtgagggttaatttcgagcttggcgtaatcatggtcatagctgtttcctgtgtgaaattgttatccgctcacaattccacacaacatacgagccggaagcataaagtgtaaagcctggggtgcctaatgagtgagctaactcacattaattgcgttgcgctcactgcccgctttccagtcgggaaacctgtcgtgccagctgcattaatgaatcggccaacgcgcggggagaggcggtttgcgtattgggcgctcttccgcttcctcgctcactgactcgctgcgctcggtcgttcggctgcggcgagcggtatcagctcactcaaaggcggtaatacggttatccacagaatcaggggataacgcaggaaagaacatgtgagcaaaaggccagcaaaaggccaggaaccgtaaaaaggccgcgttgctggcgtttttccataggctccgcccccctgacgagcatcacaaaaatcgacgctcaagtcagaggtggcgaaacccgacaggactataaagataccaggcgtttccccctggaagctccctcgtgcgctctcctgttccgaccctgccgcttaccggatacctgtccgcctttctcccttcgggaagcgtggcgctttctcatagctcacgctgtaggtatctcagttcggtgtaggtcgttcgctccaagctgggctgtgtgcacgaaccccccgttcagcccgaccgctgcgccttatccggtaactatcgtcttgagtccaacccggtaagacacgacttatcgccactggcagcagccactggtaacaggattagcagagcgaggtatgtaggcggtgctacagagttcttgaagtggtggcctaactacggctacactagaaggacagtatttggtatctgcgctctgctgaagccagttaccttcggaaaaagagttggtagctcttgatccggcaaacaaaccaccgctggtagcggtggtttttttgtttgcaagcagcagattacgcgcagaaaaaaaggatctcaagaagatcctttgatcttttctacggggtctgacgctcagtggaacgaaaactcacgttaagggattttggtcatgagattatcaaaaaggatcttcacctagatccttttaaattaaaaatgaagttttaaatcaatctaaagtatatatgagtaaacttggtctgacagttaccaatgcttaatcagtgaggcacctatctcagcgatctgtctatttcgttcatccatagttgcctgactccccgtcgtgtagataactacgatacgggagggcttaccatctggccccagtgctgcaatgataccgcgagacccacgctcaccggctccagatttatcagcaataaaccagccagccggaagggccgagcgcagaagtggtcctgcaactttatccgcctccatccagtctattaattgttgccgggaagctagagtaagtagttcgccagttaatagtttgcgcaacgttgttgccattgctacaggcatcgtggtgtcacgctcgtcgtttggtatggcttcattcagctccggttcccaacgatcaaggcgagttacatgatcccccatgttgtgcaaaaaagcggttagctccttcggtcctccgatcgttgtcagaagtaagttggccgcagtgttatcactcatggttatggcagcactgcataattctcttactgtcatgccatccgtaagatgcttttctgtgactggtgagtactcaaccaagtcattctgagaatagtgtatgcggcgaccgagttgctcttgcccggcgtcaatacgggataataccgcgccacatagcagaactttaaaagtgctcatcattggaaaacgttcttcggggcgaaaactctcaaggatcttaccgctgttgagatccagttcgatgtaacccactcgtgcacccaactgatcttcagcatcttttactttcaccagcgtttctgggtgagcaaaaacaggaaggcaaaatgccgcaaaaaagggaataagggcgacacggaaatgttgaatactcatactcttcctttttcaatattattgaagcatttatcagggttattgtctcatgagcggatacatatttgaatgtatttagaaaaataaacaaataggggttccgcgcacatttccccgaaaagtgccacctaaattgtaagcgttaatattttgttaaaattcgcgttaaatttttgttaaatcagctcattttttaaccaataggccgaaatcggcaaaatcccttataaatcaaaagaatagaccgagatagggttgagtgttgttccagtttggaacaagagtccactattaaagaacgtggactccaacgtcaaagggcgaaaaaccgtctatcagggcgatggcccactacgtgaaccatcaccctaatcaagttttttggggtcgaggtgccgtaaagcactaaatcggaaccctaaagggagcccccgatttagagcttgacggggaaagccggcgaacgtggcgagaaaggaagggaagaaagcgaaaggagcgggcgctagggcgctggcaagtgtagcggtcacgctgcgcgtaaccaccacacccgccgcgcttaatgcgccgctacagggcgcgtcccattcgccattcaggctgcgcaactgttgggaagggcgatcggtgcgggcctcttcgctattacgccagctggcgaaagggggatgtgctgcaaggcgattaagttgggtaacgccagggttttcccag

SEQ ID NO: 37 - DNA, 4443 bp, Artificial sequence
  Synthetic
tcacgacgttgtaaaacgacggccagtgaattgtaatacgactcactatagggcgaattgggtaccgggccccccctcgaggtcgacggtatcgataagctttgagagtacaatgatgaacctagattaatcaatgccaaagtctgaaaaatgcaccctcagtctatgatccagaaaatcaagattgcttgaggccctgttcggttgttccggattagagccccggattaattcctagccggattacttctctaatttatatagattttgatgagctggaatgaatcctggcttattccggtacaaccgaacaggccctgaaggataccagtaatcgctgagctaaattggcatgctgtcagagtgtcagtattgcagcaaggtagtgagataaccggcatcatggtgccagtttgatggcaccattagggttagagatggtggccatgggcgcatgtcctggccaactttgtatgatatatggcagggtgaataggaaagtaaaattgtattgtaaaaagggatttcttctgtttgttagcgcatgtacaaggaatgcaagttttgagcgagggggcatcaaagatctggctgtgtttccagctgtttttgttagccccatcgaatccttgacataatgatcccgcttaaataagcaacctcgcttgtatagttccttgtgctctaacacacgatgatgataagtcgtaaaatagtggtgtccaaagaatttccaggcccagttgtaaaagctaaaatgctattcgaatttctactagcagtaagtcgtgtttagaaattatttttttatataccttttttccttctatgtacagtaggacacagtgtcagcgccgcgttgacggagaatatttgcaaaaaagtaaaagagaaagtcatagcggcgtatgtgccaaaaacttcgtcacagagagggccataagaaacatggcccacggcccaatacgaagcaccgcgacgaagcccaaacagcagtccgtaggtggagcaaagcgctgggtaatacgcaaacgttttgtcccaccttgactaatcacaagagtggagcgtaccttataaaccgagccgcaagcaccgaattttctctgacgctatatataataggttttagagctagaaatagcaagttaaaataaggctagtccgttatcaacttgaaaaagtggcaccgagtcggtgctttttttttgcggccgcgaattcctgcagggccctcttgtcggaccagttgcccaccacgttggtgagctcggtgaggcccttcattgagaggaaggaggtcatgaggtgcctaccgatgtgggacttggggccgttcttgatggcgaagatggagtagggggcgttcttcttgagggccttgttgtaggacctcacgaggttgtccttgaggagctggtactcctgcttgttggaggaggagttgccggtcctgttcaccctcttgagcacgggctctgagttcctgaggaactcgtcgaggtacacgagggggtcgatcctgccgcgagcggagaagaagtagatgtgcctggacacggaggtcttggtctcggtcacgaggcactggatgatcacgccgaggtacttgttctgactagttctagagcggccgccaccgcggtggagctccagcttttgttccctttagtgagggttaatttcgagcttggcgtaatcatggtcatagctgtttcctgtgtgaaattgttatccgctcacaattccacacaacatacgagccggaagcataaagtgtaaagcctggggtgcctaatgagtgagctaactcacattaattgcgttgcgctcactgcccgctttccagtcgggaaacctgtcgtgccagctgcattaatgaatcggccaacgcgcggggagaggcggtttgcgtattgggcgctcttccgcttcctcgctcactgactcgctgcgctcggtcgttcggctgcggcgagcggtatcagctcactcaaaggcggtaatacggttatccacagaatcaggggataacgcaggaaagaacatgtgagcaaaaggccagcaaaaggccaggaaccgtaaaaaggccgcgttgctggcgtttttccataggctccgcccccctgacgagcatcacaaaaatcgacgctcaagtcagaggtggcgaaacccgacaggactataaagataccaggcgtttccccctggaagctccctcgtgcgctctcctgttccgaccctgccgcttaccggatacctgtccgcctttctcccttcgggaagcgtggcgctttctcatagctcacgctgtaggtatctcagttcggtgtaggtcgttcgctccaagctgggctgtgtgcacgaaccccccgttcagcccgaccgctgcgccttatccggtaactatcgtcttgagtccaacccggtaagacacgacttatcgccactggcagcagccactggtaacaggattagcagagcgaggtatgtaggcggtgctacagagttcttgaagtggtggcctaactacggctacactagaaggacagtatttggtatctgcgctctgctgaagccagttaccttcggaaaaagagttggtagctcttgatccggcaaacaaaccaccgctggtagcggtggtttttttgtttgcaagcagcagattacgcgcagaaaaaaaggatctcaagaagatcctttgatcttttctacggggtctgacgctcagtggaacgaaaactcacgttaagggattttggtcatgagattatcaaaaaggatcttcacctagatccttttaaattaaaaatgaagttttaaatcaatctaaagtatatatgagtaaacttggtctgacagttaccaatgcttaatcagtgaggcacctatctcagcgatctgtctatttcgttcatccatagttgcctgactccccgtcgtgtagataactacgatacgggagggcttaccatctggccccagtgctgcaatgataccgcgagacccacgctcaccggctccagatttatcagcaataaaccagccagccggaagggccgagcgcagaagtggtcctgcaactttatccgcctccatccagtctattaattgttgccgggaagctagagtaagtagttcgccagttaatagtttgcgcaacgttgttgccattgctacaggcatcgtggtgtcacgctcgtcgtttggtatggcttcattcagctccggttcccaacgatcaaggcgagttacatgatcccccatgttgtgcaaaaaagcggttagctccttcggtcctccgatcgttgtcagaagtaagttggccgcagtgttatcactcatggttatggcagcactgcataattctcttactgtcatgccatccgtaagatgcttttctgtgactggtgagtactcaaccaagtcattctgagaatagtgtatgcggcgaccgagttgctcttgcccggcgtcaatacgggataataccgcgccacatagcagaactttaaaagtgctcatcattggaaaacgttcttcggggcgaaaactctcaaggatcttaccgctgttgagatccagttcgatgtaacccactcgtgcacccaactgatcttcagcatcttttactttcaccagcgtttctgggtgagcaaaaacaggaaggcaaaatgccgcaaaaaagggaataagggcgacacggaaatgttgaatactcatactcttcctttttcaatattattgaagcatttatcagggttattgtctcatgagcggatacatatttgaatgtatttagaaaaataaacaaataggggttccgcgcacatttccccgaaaagtgccacctaaattgtaagcgttaatattttgttaaaattcgcgttaaatttttgttaaatcagctcattttttaaccaataggccgaaatcggcaaaatcccttataaatcaaaagaatagaccgagatagggttgagtgttgttccagtttggaacaagagtccactattaaagaacgtggactccaacgtcaaagggcgaaaaaccgtctatcagggcgatggcccactacgtgaaccatcaccctaatcaagttttttggggtcgaggtgccgtaaagcactaaatcggaaccctaaagggagcccccgatttagagcttgacggggaaagccggcgaacgtggcgagaaaggaagggaagaaagcgaaaggagcgggcgctagggcgctggcaagtgtagcggtcacgctgcgcgtaaccaccacacccgccgcgcttaatgcgccgctacagggcgcgtcccattcgccattcaggctgcgcaactgttgggaagggcgatcggtgcgggcctcttcgctattacgccagctggcgaaagggggatgtgctgcaaggcgattaagttgggtaacgccagggttttcccag

SEQ ID NO: 38 - DNA, 4443 bp, Artificial sequence
  Synthetic
tcacgacgttgtaaaacgacggccagtgaattgtaatacgactcactatagggcgaattgggtaccgggccccccctcgaggtcgacggtatcgataagctttgagagtacaatgatgaacctagattaatcaatgccaaagtctgaaaaatgcaccctcagtctatgatccagaaaatcaagattgcttgaggccctgttcggttgttccggattagagccccggattaattcctagccggattacttctctaatttatatagattttgatgagctggaatgaatcctggcttattccggtacaaccgaacaggccctgaaggataccagtaatcgctgagctaaattggcatgctgtcagagtgtcagtattgcagcaaggtagtgagataaccggcatcatggtgccagtttgatggcaccattagggttagagatggtggccatgggcgcatgtcctggccaactttgtatgatatatggcagggtgaataggaaagtaaaattgtattgtaaaaagggatttcttctgtttgttagcgcatgtacaaggaatgcaagttttgagcgagggggcatcaaagatctggctgtgtttccagctgtttttgttagccccatcgaatccttgacataatgatcccgcttaaataagcaacctcgcttgtatagttccttgtgctctaacacacgatgatgataagtcgtaaaatagtggtgtccaaagaatttccaggcccagttgtaaaagctaaaatgctattcgaatttctactagcagtaagtcgtgtttagaaattatttttttatataccttttttccttctatgtacagtaggacacagtgtcagcgccgcgttgacggagaatatttgcaaaaaagtaaaagagaaagtcatagcggcgtatgtgccaaaaacttcgtcacagagagggccataagaaacatggcccacggcccaatacgaagcaccgcgacgaagcccaaacagcagtccgtaggtggagcaaagcgctgggtaatacgcaaacgttttgtcccaccttgactaatcacaagagtggagcgtaccttataaaccgagccgcaagcaccgaattttctgtaacactactgctgttcagttttagagctagaaatagcaagttaaaataaggctagtccgttatcaacttgaaaaagtggcaccgagtcggtgctttttttttgcggccgcgaattcctgcagggccctcttgtcggaccagttgcccaccacgttggtgagctcggtgaggcccttcattgagaggaaggaggtcatgaggtgcctaccgatgtgggacttggggccgttcttgatggcgaagatggagtagggggcgttcttcttgagggccttgttgtaggacctcacgaggttgtccttgaggagctggtactcctgcttgttggaggaggagttgccggtcctgttcaccctcttgagcacgggctctgagttcctgaggaactcgtcgaggtacacgagggggtcgatcctgccgcgagcggagaagaagtagatgtgcctggacacggaggtcttggtctcggtcacgaggcactggatgatcacgccgaggtacttgttctgactagttctagagcggccgccaccgcggtggagctccagcttttgttccctttagtgagggttaatttcgagcttggcgtaatcatggtcatagctgtttcctgtgtgaaattgttatccgctcacaattccacacaacatacgagccggaagcataaagtgtaaagcctggggtgcctaatgagtgagctaactcacattaattgcgttgcgctcactgcccgctttccagtcgggaaacctgtcgtgccagctgcattaatgaatcggccaacgcgcggggagaggcggtttgcgtattgggcgctcttccgcttcctcgctcactgactcgctgcgctcggtcgttcggctgcggcgagcggtatcagctcactcaaaggcggtaatacggttatccacagaatcaggggataacgcaggaaagaacatgtgagcaaaaggccagcaaaaggccaggaaccgtaaaaaggccgcgttgctggcgtttttccataggctccgcccccctgacgagcatcacaaaaatcgacgctcaagtcagaggtggcgaaacccgacaggactataaagataccaggcgtttccccctggaagctccctcgtgcgctctcctgttccgaccctgccgcttaccggatacctgtccgcctttctcccttcgggaagcgtggcgctttctcatagctcacgctgtaggtatctcagttcggtgtaggtcgttcgctccaagctgggctgtgtgcacgaaccccccgttcagcccgaccgctgcgccttatccggtaactatcgtcttgagtccaacccggtaagacacgacttatcgccactggcagcagccactggtaacaggattagcagagcgaggtatgtaggcggtgctacagagttcttgaagtggtggcctaactacggctacactagaaggacagtatttggtatctgcgctctgctgaagccagttaccttcggaaaaagagttggtagctcttgatccggcaaacaaaccaccgctggtagcggtggtttttttgtttgcaagcagcagattacgcgcagaaaaaaaggatctcaagaagatcctttgatcttttctacggggtctgacgctcagtggaacgaaaactcacgttaagggattttggtcatgagattatcaaaaaggatcttcacctagatccttttaaattaaaaatgaagttttaaatcaatctaaagtatatatgagtaaacttggtctgacagttaccaatgcttaatcagtgaggcacctatctcagcgatctgtctatttcgttcatccatagttgcctgactccccgtcgtgtagataactacgatacgggagggcttaccatctggccccagtgctgcaatgataccgcgagacccacgctcaccggctccagatttatcagcaataaaccagccagccggaagggccgagcgcagaagtggtcctgcaactttatccgcctccatccagtctattaattgttgccgggaagctagagtaagtagttcgccagttaatagtttgcgcaacgttgttgccattgctacaggcatcgtggtgtcacgctcgtcgtttggtatggcttcattcagctccggttcccaacgatcaaggcgagttacatgatcccccatgttgtgcaaaaaagcggttagctccttcggtcctccgatcgttgtcagaagtaagttggccgcagtgttatcactcatggttatggcagcactgcataattctcttactgtcatgccatccgtaagatgcttttctgtgactggtgagtactcaaccaagtcattctgagaatagtgtatgcggcgaccgagttgctcttgcccggcgtcaatacgggataataccgcgccacatagcagaactttaaaagtgctcatcattggaaaacgttcttcggggcgaaaactctcaaggatcttaccgctgttgagatccagttcgatgtaacccactcgtgcacccaactgatcttcagcatcttttactttcaccagcgtttctgggtgagcaaaaacaggaaggcaaaatgccgcaaaaaagggaataagggcgacacggaaatgttgaatactcatactcttcctttttcaatattattgaagcatttatcagggttattgtctcatgagcggatacatatttgaatgtatttagaaaaataaacaaataggggttccgcgcacatttccccgaaaagtgccacctaaattgtaagcgttaatattttgttaaaattcgcgttaaatttttgttaaatcagctcattttttaaccaataggccgaaatcggcaaaatcccttataaatcaaaagaatagaccgagatagggttgagtgttgttccagtttggaacaagagtccactattaaagaacgtggactccaacgtcaaagggcgaaaaaccgtctatcagggcgatggcccactacgtgaaccatcaccctaatcaagttttttggggtcgaggtgccgtaaagcactaaatcggaaccctaaagggagcccccgatttagagcttgacggggaaagccggcgaacgtggcgagaaaggaagggaagaaagcgaaaggagcgggcgctagggcgctggcaagtgtagcggtcacgctgcgcgtaaccaccacacccgccgcgcttaatgcgccgctacagggcgcgtcccattcgccattcaggctgcgcaactgttgggaagggcgatcggtgcgggcctcttcgctattacgccagctggcgaaagggggatgtgctgcaaggcgattaagttgggtaacgccagggttttcccag

SEQ ID NO: 39 - protein, 497 aa, Artificial Sequence
  Engineered variant
MGESVKAIKLKILDMFLDPECTKQDDNWRKDLSTMSRFCGEAGNMCLRDLYNYFSMPKEDRISSKDLYNAMYHKTKLLHPELPGKVANQIVNHAKDVWKRNAKLIYRNQISMPTYKITTAPIRLQNNIYKLIKNKNKYIIDVQLYSKEYSKDSGKGTHRYFLVAVRDSSTRMIFDRIMSKDHIDSSKSYTQGQLQIKKDHQGKWYCIIPYTFPTHETVLDPDKVMGVDLGVAKAVYWAFNSSYKRGCIDGGEIEHFRKMIRARRVSIQNQIKHSGDARKGHGRKRALKPIETLSEKEKNFRDTINHRYANRIVEAAIKQGCGTIQIENLEGIADTTGSKFLKNWPYYDLQTKIVNKAKEHGITVVAINPQYTSQRCSMCGYIEKTNRSSQAVFECKQCGYGSRTICINCRHVQVSGDVCEECGGIVKKENVNADYNAAKNISTPYIDQIIMEKCLELGIPYRSITCKECGHIQASGNTCEVCGSTNILKPKKIRKAK

SEQ ID NO: 40 - DNA, 1494 bp, Artificial sequence
  Synthetic
atgggcgagagcgtgaaggccatcaagctgaagatcctggacatgttcctggacccggagtgcaccaagcaggacgacaactggaggaaggacctgagcaccatgagcaggttctgcggcgaggccggcaacatgtgcctgagggacctgtacaactacttcagcatgccgaaggaggacaggatcagcagcaaggacctgtacaacgccatgtaccacaagaccaagctgctgcacccgggcctgccgggcaaggtgaagaaccagatcgtgaaccacgccaaggacgtgtggaagaggaacgccaagctgatctacaggaaccagatcagcatgccgacctacaagatcaccaccgccccgatcaggctgcagaacaacatctacaagctgatcaagaacaagaacaagtacatcatcgacgtgcagctgtacagcaaggagtacagcaaggacagcggcaagggcacccacaggtacttcctggtggccgtgagggacagcagcaccaggatgatcttcgacaggatcatgagcaaggaccacatcgacagcagcaagagctacaagcagggccagctgcagatcaagaaggaccaccagggcaagtggtactgcatcatcccgtacaccttcccgacccacgagcacgtgctggacccggacaaggtgatgggcgtggacctgggcgtggccaaggccgtgtactgggccttcaacagcagctacaagaggggctgcatcgacggcggcgagatcgagcacttcaggaagatgatcagggccaggagggtgagcatccagaaccagatcaagcacagcggcgacgccaggaagggccacggcaggaagagggccctgaagccgatcgagaccctgagcgagaaggagagcaacttcagggacaccatcaacttcaggtacgccaacaggatcgtggaggccgccatcaagcagggctgcggcaccatccagatcgagaacctggagggcatcgccgacaggaccggcagcaagttcctgaagaactggccgtactacgacctgcagaccaagatcgtgaacaaggccaaggagcacggcatcaccgtggtggccatcaacccgcagtacaccagccagaggtgcagcatgtgcggctacatcgagaagaccaacaggagcagccaggccgtgttcgagtgcaagcagtgcggctacggcagcaggaccaactgcatcaactgcaggcacgtgcaggtgagcggcgacgtgtgcgaggagtgcggcggcatcgtgaagaaggagaacgtgaacgccgactacaacgccgccaagaacatcagcaccccgtacatcgaccagatcatcatggagaagtgcctggagctgggcatcccgtacaggagcatcacctgcaaggagtgcggccacatccaggccagcggcaacacctgcgaggtgtgcggcagcaccaacatcctgaagccgaagaagatcaggaaggccaagtaa

SEQ ID NO: 41 - protein, 497 aa, Artificial sequence
  Synthetic
MGESVKAIKLKILDMFLDPECTKQDDNWRKDLSTMSRFCGEAGNMCLRDLYNYFSMPKEDRISSKDLYNAMYHKTKLLHPGLPGKVKNQIVNHAKDVWKRNAKLIYRNQISMPTYKITTAPIRLQNNIYKLIKNKNKYIIDVQLYSKEYSKDSGKGTHRYFLVAVRDSSTRMIFDRIMSKDHIDSSKSYKQGQLQIKKDHQGKWYCIIPYTFPTHEHVLDPDKVMGVDLGVAKAVYWAFNSSYKRGCIDGGEIEHFRKMIRARRVSIQNQIKHSGDARKGHGRKRALKPIETLSEKESNFRDTINFRYANRIVEAAIKQGCGTIQIENLEGIADRTGSKFLKNWPYYDLQTKIVNKAKEHGITVVAINPQYTSQRCSMCGYIEKTNRSSQAVFECKQCGYGSRTNCINCRHVQVSGDVCEECGGIVKKENVNADYNAAKNISTPYIDQIIMEKCLELGIPYRSITCKECGHIQASGNTCEVCGSTNILKPKKIRKAK

SEQ ID NO: 42 - DNA, 14581 bp, Artificial sequence
  Synthetic
gtttacccgccaatatatcctgtcaaacactgcggccgcacttgaggccgagctcggtacggccagaatggcccggaccgggttaccaagcggccgcatcgagcagctggcttgtggggaccagacaaaaaaggaatggtgcagaattgttaggcgcacctaccaaaagcatctttgcctttattgcaaagataaagcagattcctctagtacaagtggggaacaaaataacgtggaaaagagctgtcctgacagcccactcactaatgcgtatgacgaacgcagtgacgaccacaaaactcgagcaacgagatcatgagccaatcaaagaggagtgatgtagacctaaagcaataatggagccatgacgtaagggcttacgcccatacgaaataattaaaggctgatgtgacctgtcggtctctcagaacctttactttttatgtttggcgtgtatttttaaatttccacggcaatgacgatgtgaccgtcgacccactaaaacattgctttgtcaaaagctaaaaaagatgatgcccgacagccacttgtgtgaagcatgagaagccggtccctccactaagaaaattagtgaagcatcttccagtggtccctccactcacagctcaatcagtgagcaacaggacgaaggaaatgacgtaagccatgacgtctaatcccagggcccggtgaccaatcgaattcttaccctagctccctgcggctgttacgcggtcccccatcaatcttctgttcttgcggttgtagcctgtgtaacagtgctagagtatgtatgataaataggttttaagtctgcttacatgacattttttattgtggaagagacatataaaaattagagagagtggttctcatgcaacggcggacggcccggtgctaaaagagcttcaagacaaaataatgaaacaggaagagagtagatttatctaagagccaactttattatatgaatgtgtttattgttggctttagatgatatggtaaggagttagagctaataatagataggctctattattattattattaattaaactcgctctaaggaggaaagtgggaggaagggacgaggacgaagactactggaagcatcgtgcatggatgatggatgtggtgtctcttaatgtaggtggccggaggatgtacgtgttaattgcgcgataagcactcagatccaaccgcaaactacctccacactgacacactgatagagagaaagagagacctccgacgactgccgccgcagatgagccacgtacgtatacgacgtctgccggccggctcaggctgccgccatcaccctgctcgaaagtcgcgttaggcggcgccagctacataggagtatctagtctagccagttagtatactactactgcgctgatgatgaattaactctgcatagatactgtacttgcctccctccaacacccaaccacctcctgctcggctcttaataacttggacacggatcgatgccatccaaggaagaacacgacgacgacgacggaacatccaccatgcaagcttgcatccatacgccgatacgcgtgcatccatccatccaccattatttccattttccaccgatcacacgtacacaggcctatttaaggagcgacatcccactgcaactctcctcaccactcatcaccagctagctctagcaaagcacttgccatctaccgaccgccgcattccaaacagcccgacgagctagcagagcggcaggcacctccctcctcaaggaacccatggcggccaatgcgggcggcggtggagcgggaggaggcagcggcagcggcagcgtggctgcgccggcggtgtgccgccccagcggctcgcggtggacgccgacgccggagcagatcaggatgctgaaggagctctactacggctgcggcatccggtcgcccagctcggagcagatccagcgcatcaccgccatgctgcggcagcacggcaagatcgagggcaagaacgtcttctactggttccagaaccacaaggcccgcgagcgccagaagcgccgcctcaccagcctcgacgtcaacgtgcccgccgccggcgcggccgacgccaccaccagccaactcggcgtcctctcgctgtcgtcgccgccgccttcaggcgcggcgcctccctcgcccaccctcggcttctacgccgccggcaatggcggcggatcggctgtgctgctggacacgagttccgactggggcagcagcggcgctgctatggccaccgagacatgcttcctgcaggactacatgggcgtgacggacacgggcagctcgtcgcagtggccacgcttctcgtcgtcggacacgataatggcggcggccgcggcgcgggcggcgacgacgcgggcgcccgagacgctccctctcttcccgacctgcggcgacgacggcggcagcggtagcagcagctacttgccgttctggggtgccgcgtccacaactgccggcgccacttcttccgttgcgatccaacagcaacaccagctgcaggagcagtacagcttttacagcaacagcaacagcacccagctggccggcaccggcaaccaagacgtatcggcaacagcagcagcagccgccgccctggagctgagcctcagctcatggtgctccccttaccctgctgcagggagtatgtgagagcaacgcgagctgccactgctcttcactgatgtctctggaatggaaggaggaggaagtgagaacagatcattcgacaaagcagcattagtccgttgatcggtggaagaccactcgtcagtgttgagttgaatgtttgatcaataaaatacggcaatgctgtaagggttgttttttatgccattgataatacactgtactgttcagttgttgaactctatttcttagccatgccaagtgcttttcttattttgaataacattacagcaaaaagttgaaagacaaaaaaaaaaacccccgaacagagtgctttgggtcccaagcttctttagactgtgttcggcgttccccctaaatttctccccctatatctcactcacttgtcacatcagcgttctctttccccctatatctccacgctctacagcagttccacctatatcaaacctctataccccaccacaacaatattatatactttcatcttcaactaactcatgtaccttccaatttttttctactaataattatttacgtgcacagaaacttagcaaggagagagagagcggggtcacccggtccgggcctagaaggccagcttcaagtttgtacaaagtggccgttaacggatcggccagaatggcccggaccgaagccgaggccggccacactgatagtttaaactgaaggcgggaaacgacaatctgatcatgagcggagaattaagggagtcacgttatgacccccgccgatgacgcgggacaagccgttttacgtttggaactgacagaaccgcaacgattgaaggagccactcagccgcgggtttctggagtttaatgagctaagcacatacgtcagaaaccattattgcgcgttcaaaagtcgcctaaggtcactatcagctagcaaatatttcttgtcaaaaatgctccactgacgttccataaattcccctcggtatccaattagagtctcatattcactctcccggcggatctcgactctagaggatcgctcaggaaggccgctgagatagagccatggggaggagggcgtgttgcgcgaaggaaggcgttaagagaggggcgtggacgagcaaggaggacgatgccttggccgcctacgtcaaggcccacggcgaaggcaaatggagggaagtgccccagaaagccggtttgcgtcggtgcggcaagagctgccggctgcggtggctgaactacctccggcccaacatcaggcgcggcaacatctcctacgacgaggaggatctcatcatccgcctccacaggctcctcggcaacaggtggtcgctgattgcaggcaggctgcctggccgaacagacaatgaaatcaagaactactggaacagcacgctgggccggagggcaggcgccggcgccggcgccggcggcagatccacgatggcgctttcagcttcccgagttcagcaggcggaagaactgctgcaacgacctgctgagaggcagctgatgaggagccagcttgctgcagccgccaggagcatcaactggagctacgccctcttctggtccatttcagacactcaaccaggggtgctgacgtggacggacgggttctacaacggcgaggtgaagacgcggaagatttccaactccgtggagctgacatccgaccagctcgtcatgcagaggagcgaccagctccgggagctctacgaggccctcctgtcgggcgagggcgaccgccgcgctgcgcctgcgcggccggccggctctctgtcgccggaggacctcggcgacaccgagtggtactacgtggtgtccatgacctacgccttccggccaggccaagggttgcccggcaggagtttcgcgagcgacgagcatgtctggctgtgcaacgcgcacctcgccggcagcaaagccttcccccgcgcgctcctcgccaagagcgcgtccattcagtcaatcctctgcatcccggttatgggcggcgtgcttgagcttggtacaactgacacggtgccggaggccccggacttggtcagccgagcaaccgcggctttctgggagccgcagtgcccgagctccagcccgtcaggacgagcaaacgagacgggcgaggccgcagcagacgacggcacgtttgcgttcgaggaactcgaccacaataatggcatggacgacatagaggcgatgaccgccgccgggggacacgggcaggaggaggagctaagactaagagaagccgaggccctgtcagacgacgcaagcctggagcacatcaccaaggagatcgaggagttctacagcctctgcgacgaaatggacctgcaggcgctaccactaccgctagaggacggctggaccgtggacgcgtccaatttcgaggtcccctgctcttccccgcagccagcgccgcctccggtggatagggctaccgctaacgtcgccgccgacgcctcaagggcacccgtctacggctctcgcgcgacgagtttcatggcttggacgaggtcctcgcagcagtcgtcgtgctccgacgacgcggcgcccgcagcagtagtgccggccatcgaggagccgcagagattgctgaagaaagtggtggccggcggcggtgcttgggagagctgtggcggcgcgacgggagcagcacaggaaatgagtggcactggcaccaagaaccacgtcatgtcggagcgaaagcgacgagagaagctcaacgagatgttcctcgtcctcaagtcactgcttccgtccattcacagggtgaacaaagcgtcgatcctcgccgaaacgatagcctacctcaaggagcttcagagaagggtgcaagagctggagtccagtagggaacctgcgtcgcgcccatccgaaacgacgacaaggctaataacaaggccctcccgtggcaataatgagagtgtgaggaaggaggtctgcgcgggctccaagaggaagagcccagagctcggcagagacgacgtggagcgccccccggtcctcacgatggacgccggcaccagcaacgtcaccgtcaccgtctcggacaaggatgtgctcctggaggtgcagtgccggtgggaggagctcctgatgacgcgagtgttcgacgccatcaagagcctccatttggacgtcctctcggttcaggcttcagcgccagatggcttcatggggcttaagatacgagctcagtttgctggctccggtgccgtcgtgccctggatgatcagcgaggctcttcgcaaagctatagggaacccctgggtcgtcgtcgcgccggacaccggctcgcacgccaccccggccgcgacgtcgggcgcctgcgagacgggccagaatagcgccgctcatcgcgcggaccccgactcagccgggacgacgacgacctcggcggcggcggtgtgggcgcccaaggccgtgcggtgcacgggcggactcttcttcttccaccgggacacgacgccggcgcacgcgggcgagacggcgacgccaatggccggtggaggtggaggaggaggaggagaagcagggtcgtcggacgactgcagctcggcggcgtcggtatcgcttcgcgtcggaagccacgacgagccgtgcttctccggcgacggtgacggcgactggatggacgacgtgagggccctggcgtcgtttctggagtccgacgaggactggctccgctgtcagacggccgggcagcttgcgtagtggccaggtaccactaactatctatactgtaataatgttgtatagccgccggatagctagctagtttagtcattcagcggcgatgggtaataataaagtgtcatccatccatcaccatgcgtggcaacgtgagcaatgacctgattgaacaaattgaaatgaaaagaagaaatatgttatatgtcaacgagatttcctcataatgccactgacgacgtgtgtccaagaaatgtatcagtgatacgtatattcacaatttttttatgacttatactcacaatttgtttttttactacttatactcacaatttgttgtgcgtaccataacaatttcgatcgaatatatatcagaaagttgacgaaagtaagctcactcaaaaagttaaatgggctgcggaagctgcgtcaggcccaagttttggctattctatccggtatccacgattttgatggctgagggacatatgttcgcttaagcttggcgcgccggtcacccggtccgggcctagaaggccagcttcggccgccccgggggtaccgagctcgaattccaactttgtatagaaaagttgggccgaattcgagctcggtacggccagaatggcccggaccgaagcttgcatgcctgcagtgcagcgtgacccggtcgtgcccctctctagagataatgagcattgcatgtctaagttataaaaaattaccacatattttttttgtcacacttgtttgaagtgcagtttatctatctttatacatatatttaaactttactctacgaataatataatctatagtactacaataatatcagtgttttagagaatcatataaatgaacagttagacatggtctaaaggacaattgagtattttgacaacaggactctacagttttatctttttagtgtgcatgtgttctcctttttttttgcaaatagcttcacctatataatacttcatccattttattagtacatccatttagggtttagggttaatggtttttatagactaatttttttagtacatctattttattctattttagcctctaaattaagaaaactaaaactctattttagtttttttatttaataatttagatataaaatagaataaaataaagtgactaaaaattaaacaaataccctttaagaaattaaaaaaactaaggaaacatttttcttgtttcgagtagataatgccagcctgttaaacgccgtcgacgagtctaacggacaccaaccagcgaaccagcagcgtcgcgtcgggccaagcgaagcagacggcacggcatctctgtcgctgcctctggacccctctcgagagttccgctccaccgttggacttgctccgctgtcggcatccagaaattgcgtggcggagcggcagacgtgagccggcacggcaggcggcctcctcctcctctcacggcaccggcagctacgggggattcctttcccaccgctccttcgctttcccttcctcgcccgccgtaataaatagacaccccctccacaccctctttccccaacctcgtgttgttcggagcgcacacacacacaaccagatctcccccaaatccacccgtcggcacctccgcttcaaggtacgccgctcgtcctcccccccccccctctctaccttctctagatcggcgttccggtccatgcatggttagggcccggtagttctacttctgttcatgtttgtgttagatccgtgtttgtgttagatccgtgctgctagcgttcgtacacggatgcgacctgtacgtcagacacgttctgattgctaacttgccagtgtttctctttggggaatcctgggatggctctagccgttccgcagacgggatcgatttcatgattttttttgtttcgttgcatagggtttggtttgcccttttcctttatttcaatatatgccgtgcacttgtttgtcgggtcatcttttcatgcttttttttgtcttggttgtgatgatgtggtctggttgggcggtcgttctagatcggagtagaattctgtttcaaactacctggtggatttattaattttggatctgtatgtgtgtgccatacatattcatagttacgaattgaagatgatggatggaaatatcgatctaggataggtatacatgttgatgcgggttttactgatgcatatacagagatgctttttgttcgcttggttgtgatgatgtggtgtggttgggcggtcgttcattcgttctagatcggagtagaatactgtttcaaactacctggtgtatttattaattttggaactgtatgtgtgtgtcatacatcttcatagttacgagtttaagatggatggaaatatcgatctaggataggtatacatgttgatgtgggttttactgatgcatatacatgatggcatatgcagcatctattcatatgctctaaccttgagtacctatctattataataaacaagtatgttttataattattttgatcttgatatacttggatgatggcatatgcagcagctatatgtggatttttttagccctgccttcatacgctatttatttgcttggtactgtttcttttgtcgatgctcaccctgttgtttggtgttacttctgcaggtcgatgaaacagatcaacaactggtttatcaatcaaaggaagcggcactggaaaggtggaggcggcagcggtggcggaggctccggaggcggtggcggcgagagcgtcaaggcaataaaattaaagatcctcgacatgttcctcgaccccgagtgcaccaagcaggtaagtttctgcttctacctttgatatatatataataattatcattaattagtagtaatataatatttcaaatatttttttcaaaataaaagaatgtagtatatagcaattgcttttctgtagtttataagtgtgtatattttaatttataacttttctaatatatgaccaaaacatggtgatgtgcaggacgacaactggcgcaaggacctcagcaccatgagccgcttctgcggcgaggccggcaacatgtgcctcagggacctctacaactacttcagcatgcccaaggaggaccgcatcagctccaaggacttatataacgccatgtaccataaaactaagctcctccaccccggcctccccgggaaggtgaagaaccaaatcgtcaaccacgccaaggacgtctggaagcgcaacgccaagctcatctaccgcaaccaaatcagcatgcccacatataagatcaccaccgcccccatccgcctccaaaataacatctacaaattaataaaaaataagaacaaatacataatcgacgtccagctctacagcaaggagtacagcaaggacagcggcaagggcacccacaggtacttcctcgtcgccgtcagggacagcagcaccaggatgatcttcgacaggatcatgagcaaggaccacatcgacagcagcaagagctacaagcagggccagctccaaatcaagaaggaccaccagggcaagtggtactgcatcatcccctatacattccccacccacgaacacgtcctcgaccccgacaaggtcatgggcgtcgacctcggggtggctaaggccgtctactgggctttcaacagcagctataaaagaggctgcatcgacggcggcgagatcgagcacttcaggaagatgatcagggcccggcgcgtcagcatccagaatcaaatcaaacacagcggcgacgcccgcaagggccacggcaggaagagggccctcaagcccatcgaaaccctcagcgagaaggagagcaacttccgcgacacaataaacttcaggtacgccaacaggatcgtcgaggccgctatcaagcagggctgcggcaccatccagatcgagaacctcgagggcatcgctgacaggaccggcagcaagttcctcaagaactggccctactacgacctccagaccaagatcgtcaataaagccaaggagcacggcatcaccgtcgtcgcaataaacccccagtatacatcccagcgctgcagcatgtgcggctacatcgagaaaaccaacaggagcagccaggccgtgttcgagtgcaagcagtgcggctacggcagccgcaccaactgcatcaactgcaggcacgtccaagtctccggcgacgtctgcgaggagtgcggcggcatcgtcaagaaggagaacgtcaacgccgactacaacgccgccaagaacatcagcaccccctacatcgaccagataataatggagaagtgcctcgagctcggcatcccctaccgctccatcacctgcaaggagtgcggccacatccaggctagcggcaacacctgcgaggtctgcggcagcaccaacatcctcaaaccaaagaagatccgcaaggcaaaaagcagggccgacccgaagaagaagcgcaaggtgtaggtaccgtcatgggtcgtttaagctgccgatgtgcctgcgtcgtctggtgccctctctccatatggaggttgtcaaagtatctgctgttcgtgtcatgagtcgtgtcagtgttggtttaataatggaccggttgtgttgtgtgtgcgtactacccagaactatgacaaatcatgaataagtttgatgtttgaaattaaagcctgtgctcattatgttctgtctttcagttgtctcctaatatttgcctgcaggtactggctatctaccgtttcttacttaggaggtgtttgaatgcactaaaactaatagttagtggctaaaattagttaaaacatccaaacaccatagctaatagttgaactattagctatttttggaaaattagttaatagtgaggtagttatttgttagctagctaattcaactaacaatttttagccaactaacaattagtttcagtgcattcaaacacccccttaatgttaacgtggttctatctaccgtctcctaatatatggttgattgttcggtttgttgctatgctattgggttctgattgctgctagttcttgctgaatccagaagttctcgtagtatagctcagattcatattatttatttgagtgataagtgatccaggttattactatgttagctaggttttttttacaaggataaattatctgtgatcataattcttatgaaagctttatgtttcctggaggcagtggcatgcaatgcatgacagcaacttgatcacaccagctgaggtagatacggtaacaaggttcttaaatctgttcaccaaatcattggagaacacacatacacattcttgccagtcttggttagagaaatttcatgacaaaatgccaaagctgtcttgactcttcacttttggccatgagtcgtgacactttaacttagcctaggatccatggcacccgggttaacggcaaacgctaattagtcactaggcccaggaaacactaactaagccctagcttatcctagcgcaacctagttaggtcttccccaagtttgtacaaaaaagcaggctccggccagaatggcccggaccgggttaccgaattcgagctcggtaccctgggatccgatatcgatgggccctggccgaagctttgagagtacaatgatgaacctagattaatcaatgccaaagtctgaaaaatgcaccctcagtctatgatccagaaaatcaagattgcttgaggccctgttcggttgttccggattagagccccggattaattcctagccggattacttctctaatttatatagattttgatgagctggaatgaatcctggcttattccggtacaaccgaacaggccctgaaggataccagtaatcgctgagctaaattggcatgctgtcagagtgtcagtattgcagcaaggtagtgagataaccggcatcatggtgccagtttgatggcaccattagggttagagatggtggccatgggcgcatgtcctggccaactttgtatgatatatggcagggtgaataggaaagtaaaattgtattgtaaaaagggatttcttctgtttgttagcgcatgtacaaggaatgcaagttttgagcgagggggcatcaaagatctggctgtgtttccagctgtttttgttagccccatcgaatccttgacataatgatcccgcttaaataagcaacctcgcttgtatagttccttgtgctctaacacacgatgatgataagtcgtaaaatagtggtgtccaaagaatttccaggcccagttgtaaaagctaaaatgctattcgaatttctactagcagtaagtcgtgtttagaaattatttttttatataccttttttccttctatgtacagtaggacacagtgtcagcgccgcgttgacggagaatatttgcaaaaaagtaaaagagaaagtcatagcggcgtatgtgccaaaaacttcgtcacagagagggccataagaaacatggcccacggcccaatacgaagcaccgcgacgaagcccaaacagcagtccgtaggtggagcaaagcgctgggtaatacgcaaacgttttgtcccaccttgactaatcacaagagtggagcgtaccttataaaccgagccgcaagcaccgaattgcccaaaacgctttcccgatgttttagagctagaaatagcaagttaaaataaggctagtccgttatcaacttgaaaaagtggcaccgagtcggtgctttttttttgcggccgcgaattcctgcagggccctcttgtcggaccagttgcccaccacgttggtgaggggcacccagctttcttgtacaaagtggccgttaacggatcggccagaatggcccggaccgggttaccgaattcgagctcggtaccctgggatccgatatcgatgggccctggccgaagctttgagagtacaatgatgaacctagattaatcaatgccaaagtctgaaaaatgcaccctcagtctatgatccagaaaatcaagattgcttgaggccctgttcggttgttccggattagagccccggattaattcctagccggattacttctctaatttatatagattttgatgagctggaatgaatcctggcttattccggtacaaccgaacaggccctgaaggataccagtaatcgctgagctaaattggcatgctgtcagagtgtcagtattgcagcaaggtagtgagataaccggcatcatggtgccagtttgatggcaccattagggttagagatggtggccatgggcgcatgtcctggccaactttgtatgatatatggcagggtgaataggaaagtaaaattgtattgtaaaaagggatttcttctgtttgttagcgcatgtacaaggaatgcaagttttgagcgagggggcatcaaagatctggctgtgtttccagctgtttttgttagccccatcgaatccttgacataatgatcccgcttaaataagcaacctcgcttgtatagttccttgtgctctaacacacgatgatgataagtcgtaaaatagtggtgtccaaagaatttccaggcccagttgtaaaagctaaaatgctattcgaatttctactagcagtaagtcgtgtttagaaattatttttttatataccttttttccttctatgtacagtaggacacagtgtcagcgccgcgttgacggagaatatttgcaaaaaagtaaaagagaaagtcatagcggcgtatgtgccaaaaacttcgtcacagagagggccataagaaacatggcccacggcccaatacgaagcaccgcgacgaagcccaaacagcagtccgtaggtggagcaaagcgctgggtaatacgcaaacgttttgtcccaccttgactaatcacaagagtggagcgtaccttataaaccgagccgcaagcaccgaattgcaatataaaattaccgatgttttagagctagaaatagcaagttaaaataaggctagtccgttatcaacttgaaaaagtggcaccgagtcggtgctttttttttgcggccgcgaattcctgcagggccctcttgtcggaccagttgcccaccacgttggtgaggggcaactttattatacaaagttgattccgattaatcgtggcctcttgctcttcaggatgaagagctatgtttaaacgtgcaagcgctactagacaattcagtacattaaaaacgtccgcaatgtgttattaagttgtctaagcgtcaatttgtttacaccacaatatatcctgcca

SEQ ID NO: 43 - DNA, 42 bp, Artificial sequence
  Synthetic
ggtggaggcggcagcggtggcggaggctccggaggcggtggc

SEQ ID NO: 44 - DNA, 48 bp, Artificial sequence
  Synthetic
aaacagatcaacaactggtttatcaatcaaaggaagcggcactggaaa

SEQ ID NO: 45 - protein, 497 aa, Artificial sequence
  Synthetic
MGESVKAIKLKILDMFLDPECTKQDDNWRKDLSTMSRFCGEAGNMCLRDLYNYFSMPKEDRISSKDLYNAMYHKTKLLHPGLPGKVKNQIVNHAKDVWKRNAKLIYRNQISMPTYKITTAPIRLQNNIYKLIKNKNKYIIDVQLYSKEYSKDSGKGTHRYFLVAVRDSSTRMIFDRIMSKDHIDSSKSYKQGQLQIKKDHQGKWYCIIPYTFPTHEHVLDPDKVMGVDLGVAKAVYWAFNSSYKRGCIDGGEIEHFRKMIRARRVSIQNQIKHSGDARKGHGRKRALKPIETLSEKESNFRDTINFRYANRIVEAAIKQGCGTIQIENLEGIADRTGSKFLKNWPYYDLQTKIVNKAKEHGITVVAINPQYTSQRCSMCGYIEKTNRSSQAVFECKQCGYGSRTNCINCRHVQVSGDVCEECGGIVKKEPVNADYNAAKNISTPYIDQIIMEKCLELGIPYRSITCKECGHIQASGNTCEVCGSTNILKPKKIRKAK

SEQ ID NO: 46 - protein, 497 aa, Artificial sequence
  Synthetic
MGESVKAIKLKILDMFLDPECTKQDDNWRKDLSTMSRFCGEAGNMCLRDLYNYFSMPKEDRISSKDLYNAMYHKTKLLHPGLPGKVKNQIVNHAKDVWKRNAKLIYRNQISMPTYKITTAPIRLQNNIYKLIKNKNKYIIDVQLYSKEYSKDSGKGTHRYFLVAVRDSSTRMIFDRIMSKDHIDSSKSYKQGQLQIKKDHQGKWYCIIPYTFPTHEHVLDPDKVMGVDLGVAKAVYWAFNSSYKRGCIDGGEIEHFRKMIRARRVSIQNQIKHSGDARKGHGRKRALKPIETHSEKESNFRDTINFRYANRIVEAAIKQGCGTIQIENLEGIADRTGSKFLKNWPYYDLQTKIVNKAKEHGITVVAINPQYTSQRCSMCGYIEKTNRSSQAVFECKQCGYGSRTNCINCRHVQVSGDVCEECGGIVKKENVNADYNAAKNISTPYIDQIIMEKCLELGIPYRSITCKECGHIQASGNTCEVCGSTNILKPKKIRKAK

SEQ ID NO: 47 - protein, 497 aa, Artificial sequence
  Synthetic
MGESVKAIKLKILDMFLDPECTKQDDNWRKDLSTMSRFCGEAGNMCLRDLYNYFSMPKEDRISSKDLYNAMYHKTKLLHPGLPGKVKNQIVNHAKDVWKRNAKLIYRNQISMPTYKITTAPIRLQNNIYKLIKNKNKYIIDVQLYSKEYSKDSGKGTHRYFLVAVRDSSTRMIFDRIMSKDHIDSSKSYKQGQLQIKKDHQGKWYCIIPYTFPTHETVLDPDKVMGVDLGVAKAVYWAFNSSYKRGCIDGGEIEHFRKMIRARRVSIQNQIKHSGDARKGHGRKRALKPIETHSEKESNFRDTINFRYANRIVEAAIKQGCGTIQIENLEGIADRTGSKFLKNWPYYDLQTKIVNKAKEHGITVVAINPQYTSQRCSMCGYIEKTNRSSQAVFECKQCGYGSRTNCINCRHVQVSGDVCEECGGIVKKENVNADYNAAKNISTPYIDQIIMEKCLELGIPYRSITCKECGHIQASGNTCEVCGSTNILKPKKIRKAK

SEQ ID NO: 48 - protein, 497 aa, Artificial sequence
  Synthetic
MGESVKAIKLKILDMFLDPECTKQDDNWRKDLSTMSRFCGEAGNMCLRDLYNYFSMPKEDRISSKDLYNAMYHKTKLLHPGLPGKVKNQIVNHAKDVWKRNAKLIYRNQISMPTYKITTAPIRLQNNIYKLIKNKNKYIIDVQLYSKEYSKDSGKGTHRYFLVAVRDSSTRMIFDRIMSKDHIDSSKSYKQGQLQIKKDHQGKWYCIIPYTFPTHETVLDPDKVMGVDLGVAKAVYWAFNSSYKRGCIDGGEIEHFRKMIRARRVSIQNQIKHSGDARKGHGRKRALKPIETLSEKESNFRDTINFRYANRIVEAAIKQGCGTIQIENLEGIADRTGSKFLKNWPYYDLQTKIVNKAKEHGITVVAINPQYTSQRCSMCGYIEKTNRSSQAVFECKQCGYGSRTNCINCRHVQVSGDVCEECGGIVKKENVNADYNAAKNISTPYIDQIIMEKCLELGIPYRSITCKECGHIQASGNTCEVCGSTNILKPKKIRKAK

SEQ ID NO: 49 - protein, 497 aa, Artificial sequence
  Synthetic
MGESVKAIKLKILDMFLDPECTKQDDNWRKDLSTMSRFCGEAGNMCLRDLYNYFSMPKEDRISSKDLYNAMYHKTKLLHPGLPGKVKNQIVNHAKDVWKRNAKLIYRNQISMPTYKITTAPIRLQNNIYKLIKNKNKYIIDVQLYSKEYSKDSGKGTHRYFLVAVRDSSTRMIFDRIMSKDHIDSSKSYKQGQLQIKKDHQGKWYCIIPYTFPTHEHVLDPDKVMGVDLGVAKAVYWAFNSSYKRGCIDGGEIEHFRKMIRARRVSIQNQIKHSGDARKGHGRKRALKPIETHSEKEKNFRDTINFRYANRIVEAAIKQGCGTIQIENLEGIADRTGSKFLKNWPYYDLQTKIVNKAKEHGITVVAINPQYTSQRCSMCGYIEKTNRSSQAVFECKQCGYGSRTNCINCRHVQVSGDVCEECGGIVKKENVNADYNAAKNISTPYIDQIIMEKCLELGIPYRSITCKECGHIQASGNTCEVCGSTNILKPKKIRKAK

SEQ ID NO: 50 - protein, 497 aa, Artificial sequence
  Synthetic
MGESVKAIKLKILDMFLDPECTKQDDNWRKDLSTMSRFCGEAGNMCLRDLYNYFSMPKEDRISSKDLYNAMYHKTKLLHPGLPGKVKNQIVNHAKDVWKRNAKLIYRNQISMPTYKITTAPIRLQNNIYKLIKNKNKYIIDVQLYSKEYSKDSGKGTHRYFLVAVRDSSTRMIFDRIMSKDHIDSSKSYKQGQLQIKKDHQGKWYCIIPYTFPTHEHVLDPDKVMGVDLGVAKAVYWAFNSSYKRGCIDGGEIEHFRKMIRARRVSIQNQIKHSGDARKGHGRKRALKPIETLSEKESNFRDTINFRYANRIVEAAIKQGCGTIQIENLEGIADRTGSKFLKNWPYYDLQTKIVNKAKEHGITVVAINPQYTSQRCSMCGYIEKTNRSSQAVFECKQCGYGSRTICINCRHVQVSGDVCEECGGIVKKEPVNADYNAAKNISTPYIDQIIMEKCLELGIPYRSITCKECGHIQASGNTCEVCGSTNILKPKKIRKAK

SEQ ID NO: 51 - protein, 497 aa, Artificial sequence
  Synthetic
MGESVKAIKLKILDMFLDPECTKQDDNWRKDLSTMSRFCGEAGNMCLRDLYNYFSMPKEDRISSKDLYNAMYHKTKLLHPGLPGKVKNQIVNHAKDVWKRNAKLIYRNQISMPTYKITTAPIRLQNNIYKLIKNKNKYIIDVQLYSKEYSKDSGKGTHRYFLVAVRDSSTRMIFDRIMSKDHIDSSKSYKQGQLQIKKDHQGKWYCIIPYTFPTHEHVLDPDKVMGVDLGVAKAVYWAFNSSYKRGCIDGGEIEHFRKMIRARRVSIQNQIKHSGDARKGHGRKRALKPIETLSEKESNFRDTINFRYANRIVEAAIKQGCGTIQIENLEGIADRTGSKFLKNWPYYDLQTKIVNKAKEHGITVVAINPQYTSQRCSMCGYIEKTNRSSQAVFECKQCGYGSRTICINCRHVQVSGDVCEECGGIVKKENVNADYNAAKNISTPYIDQIIMEKCLELGIPYRSITCKECGHIQASGNTCEVCGSTNILKPKKIRKAK

SEQ ID NO: 52 - protein, 497 aa, Artificial sequence
  Synthetic
MGESVKAIKLKILDMFLDPECTKQDDNWRKDLSTMSRFCGEAGNMCLRDLYNYFSMPKEDRISSKDLYNAMYHKTKLLHPGLPGKVKNQIVNHAKDVWKRNAKLIYRNQISMPTYKITTAPIRLQNNIYKLIKNKNKYIIDVQLYSKEYSKDSGKGTHRYFLVAVRDSSTRMIFDRIMSKDHIDSSKSYKQGQLQIKKDHQGKWYCIIPYTFPTHETVLDPDKVMGVDLGVAKAVYWAFNSSYKRGCIDGGEIEHFRKMIRARRVSIQNQIKHSGDARKGHGRKRALKPIETLSEKEKNFRDTINFRYANRIVEAAIKQGCGTIQIENLEGIADRTGSKFLKNWPYYDLQTKIVNKAKEHGITVVAINPQYTSQRCSMCGYIEKTNRSSQAVFECKQCGYGSRTNCINCRHVQVSGDVCEECGGIVKKENVNADYNAAKNISTPYIDQIIMEKCLELGIPYRSITCKECGHIQASGNTCEVCGSTNILKPKKIRKAK

SEQ ID NO: 53 - protein, 497 aa, Artificial sequence
  Synthetic
MGESVKAIKLKILDMFLDPECTKQDDNWRKDLSTMSRFCGEAGNMCLRDLYNYFSMPKEDRISSKDLYNAMYHKTKLLHPGLPGKVKNQIVNHAKDVWKRNAKLIYRNQISMPTYKITTAPIRLQNNIYKLIKNKNKYIIDVQLYSKEYSKDSGKGTHRYFLVAVRDSSTRMIFDRIMSKDHIDSSKSYKQGQLQIKKDHQGKWYCIIPYTFPTHETVLDPDKVMGVDLGVAKAVYWAFNSSYKRGCIDGGEIEHFRKMIRARRVSIQNQIKHSGDARKGHGRKRALKPIETLSEKESNFRDTINFRYANRIVEAAIKQGCGTIQIENLEGIADRTGSKFLKNWPYYDLQTKIVNKAKEHGITVVAINPQYTSQRCSMCGYIEKTNRSSQAVFECKQCGYGSRTICINCRHVQVSGDVCEECGGIVKKEPVNADYNAAKNISTPYIDQIIMEKCLELGIPYRSITCKECGHIQASGNTCEVCGSTNILKPKKIRKAK

SEQ ID NO: 54 - DNA, 14584 bp, Artificial sequence
  Synthetic
gtttacccgccaatatatcctgtcaaacactgcggccgcacttgaggccgagctcggtacggccagaatggcccggaccgggttaccaagcggccgcatcgagcagctggcttgtggggaccagacaaaaaaggaatggtgcagaattgttaggcgcacctaccaaaagcatctttgcctttattgcaaagataaagcagattcctctagtacaagtggggaacaaaataacgtggaaaagagctgtcctgacagcccactcactaatgcgtatgacgaacgcagtgacgaccacaaaactcgagcaacgagatcatgagccaatcaaagaggagtgatgtagacctaaagcaataatggagccatgacgtaagggcttacgcccatacgaaataattaaaggctgatgtgacctgtcggtctctcagaacctttactttttatgtttggcgtgtatttttaaatttccacggcaatgacgatgtgaccgtcgacccactaaaacattgctttgtcaaaagctaaaaaagatgatgcccgacagccacttgtgtgaagcatgagaagccggtccctccactaagaaaattagtgaagcatcttccagtggtccctccactcacagctcaatcagtgagcaacaggacgaaggaaatgacgtaagccatgacgtctaatcccagggcccggtgaccaatcgaattcttaccctagctccctgcggctgttacgcggtcccccatcaatcttctgttcttgcggttgtagcctgtgtaacagtgctagagtatgtatgataaataggttttaagtctgcttacatgacattttttattgtggaagagacatataaaaattagagagagtggttctcatgcaacggcggacggcccggtgctaaaagagcttcaagacaaaataatgaaacaggaagagagtagatttatctaagagccaactttattatatgaatgtgtttattgttggctttagatgatatggtaaggagttagagctaataatagataggctctattattattattattaattaaactcgctctaaggaggaaagtgggaggaagggacgaggacgaagactactggaagcatcgtgcatggatgatggatgtggtgtctcttaatgtaggtggccggaggatgtacgtgttaattgcgcgataagcactcagatccaaccgcaaactacctccacactgacacactgatagagagaaagagagacctccgacgactgccgccgcagatgagccacgtacgtatacgacgtctgccggccggctcaggctgccgccatcaccctgctcgaaagtcgcgttaggcggcgccagctacataggagtatctagtctagccagttagtatactactactgcgctgatgatgaattaactctgcatagatactgtacttgcctccctccaacacccaaccacctcctgctcggctcttaataacttggacacggatcgatgccatccaaggaagaacacgacgacgacgacggaacatccaccatgcaagcttgcatccatacgccgatacgcgtgcatccatccatccaccattatttccattttccaccgatcacacgtacacaggcctatttaaggagcgacatcccactgcaactctcctcaccactcatcaccagctagctctagcaaagcacttgccatctaccgaccgccgcattccaaacagcccgacgagctagcagagcggcaggcacctccctcctcaaggaacccatggcggccaatgcgggcggcggtggagcgggaggaggcagcggcagcggcagcgtggctgcgccggcggtgtgccgccccagcggctcgcggtggacgccgacgccggagcagatcaggatgctgaaggagctctactacggctgcggcatccggtcgcccagctcggagcagatccagcgcatcaccgccatgctgcggcagcacggcaagatcgagggcaagaacgtcttctactggttccagaaccacaaggcccgcgagcgccagaagcgccgcctcaccagcctcgacgtcaacgtgcccgccgccggcgcggccgacgccaccaccagccaactcggcgtcctctcgctgtcgtcgccgccgccttcaggcgcggcgcctccctcgcccaccctcggcttctacgccgccggcaatggcggcggatcggctgtgctgctggacacgagttccgactggggcagcagcggcgctgctatggccaccgagacatgcttcctgcaggactacatgggcgtgacggacacgggcagctcgtcgcagtggccacgcttctcgtcgtcggacacgataatggcggcggccgcggcgcgggcggcgacgacgcgggcgcccgagacgctccctctcttcccgacctgcggcgacgacggcggcagcggtagcagcagctacttgccgttctggggtgccgcgtccacaactgccggcgccacttcttccgttgcgatccaacagcaacaccagctgcaggagcagtacagcttttacagcaacagcaacagcacccagctggccggcaccggcaaccaagacgtatcggcaacagcagcagcagccgccgccctggagctgagcctcagctcatggtgctccccttaccctgctgcagggagtatgtgagagcaacgcgagctgccactgctcttcactgatgtctctggaatggaaggaggaggaagtgagaacagatcattcgacaaagcagcattagtccgttgatcggtggaagaccactcgtcagtgttgagttgaatgtttgatcaataaaatacggcaatgctgtaagggttgttttttatgccattgataatacactgtactgttcagttgttgaactctatttcttagccatgccaagtgcttttcttattttgaataacattacagcaaaaagttgaaagacaaaaaaaaaaacccccgaacagagtgctttgggtcccaagcttctttagactgtgttcggcgttccccctaaatttctccccctatatctcactcacttgtcacatcagcgttctctttccccctatatctccacgctctacagcagttccacctatatcaaacctctataccccaccacaacaatattatatactttcatcttcaactaactcatgtaccttccaatttttttctactaataattatttacgtgcacagaaacttagcaaggagagagagagcggggtcacccggtccgggcctagaaggccagcttcaagtttgtacaaagtggccgttaacggatcggccagaatggcccggaccgaagccgaggccggccacactgatagtttaaactgaaggcgggaaacgacaatctgatcatgagcggagaattaagggagtcacgttatgacccccgccgatgacgcgggacaagccgttttacgtttggaactgacagaaccgcaacgattgaaggagccactcagccgcgggtttctggagtttaatgagctaagcacatacgtcagaaaccattattgcgcgttcaaaagtcgcctaaggtcactatcagctagcaaatatttcttgtcaaaaatgctccactgacgttccataaattcccctcggtatccaattagagtctcatattcactctcccggcggatctcgactctagaggatcgctcaggaaggccgctgagatagagccatggggaggagggcgtgttgcgcgaaggaaggcgttaagagaggggcgtggacgagcaaggaggacgatgccttggccgcctacgtcaaggcccacggcgaaggcaaatggagggaagtgccccagaaagccggtttgcgtcggtgcggcaagagctgccggctgcggtggctgaactacctccggcccaacatcaggcgcggcaacatctcctacgacgaggaggatctcatcatccgcctccacaggctcctcggcaacaggtggtcgctgattgcaggcaggctgcctggccgaacagacaatgaaatcaagaactactggaacagcacgctgggccggagggcaggcgccggcgccggcgccggcggcagatccacgatggcgctttcagcttcccgagttcagcaggcggaagaactgctgcaacgacctgctgagaggcagctgatgaggagccagcttgctgcagccgccaggagcatcaactggagctacgccctcttctggtccatttcagacactcaaccaggggtgctgacgtggacggacgggttctacaacggcgaggtgaagacgcggaagatttccaactccgtggagctgacatccgaccagctcgtcatgcagaggagcgaccagctccgggagctctacgaggccctcctgtcgggcgagggcgaccgccgcgctgcgcctgcgcggccggccggctctctgtcgccggaggacctcggcgacaccgagtggtactacgtggtgtccatgacctacgccttccggccaggccaagggttgcccggcaggagtttcgcgagcgacgagcatgtctggctgtgcaacgcgcacctcgccggcagcaaagccttcccccgcgcgctcctcgccaagagcgcgtccattcagtcaatcctctgcatcccggttatgggcggcgtgcttgagcttggtacaactgacacggtgccggaggccccggacttggtcagccgagcaaccgcggctttctgggagccgcagtgcccgagctccagcccgtcaggacgagcaaacgagacgggcgaggccgcagcagacgacggcacgtttgcgttcgaggaactcgaccacaataatggcatggacgacatagaggcgatgaccgccgccgggggacacgggcaggaggaggagctaagactaagagaagccgaggccctgtcagacgacgcaagcctggagcacatcaccaaggagatcgaggagttctacagcctctgcgacgaaatggacctgcaggcgctaccactaccgctagaggacggctggaccgtggacgcgtccaatttcgaggtcccctgctcttccccgcagccagcgccgcctccggtggatagggctaccgctaacgtcgccgccgacgcctcaagggcacccgtctacggctctcgcgcgacgagtttcatggcttggacgaggtcctcgcagcagtcgtcgtgctccgacgacgcggcgcccgcagcagtagtgccggccatcgaggagccgcagagattgctgaagaaagtggtggccggcggcggtgcttgggagagctgtggcggcgcgacgggagcagcacaggaaatgagtggcactggcaccaagaaccacgtcatgtcggagcgaaagcgacgagagaagctcaacgagatgttcctcgtcctcaagtcactgcttccgtccattcacagggtgaacaaagcgtcgatcctcgccgaaacgatagcctacctcaaggagcttcagagaagggtgcaagagctggagtccagtagggaacctgcgtcgcgcccatccgaaacgacgacaaggctaataacaaggccctcccgtggcaataatgagagtgtgaggaaggaggtctgcgcgggctccaagaggaagagcccagagctcggcagagacgacgtggagcgccccccggtcctcacgatggacgccggcaccagcaacgtcaccgtcaccgtctcggacaaggatgtgctcctggaggtgcagtgccggtgggaggagctcctgatgacgcgagtgttcgacgccatcaagagcctccatttggacgtcctctcggttcaggcttcagcgccagatggcttcatggggcttaagatacgagctcagtttgctggctccggtgccgtcgtgccctggatgatcagcgaggctcttcgcaaagctatagggaacccctgggtcgtcgtcgcgccggacaccggctcgcacgccaccccggccgcgacgtcgggcgcctgcgagacgggccagaatagcgccgctcatcgcgcggaccccgactcagccgggacgacgacgacctcggcggcggcggtgtgggcgcccaaggccgtgcggtgcacgggcggactcttcttcttccaccgggacacgacgccggcgcacgcgggcgagacggcgacgccaatggccggtggaggtggaggaggaggaggagaagcagggtcgtcggacgactgcagctcggcggcgtcggtatcgcttcgcgtcggaagccacgacgagccgtgcttctccggcgacggtgacggcgactggatggacgacgtgagggccctggcgtcgtttctggagtccgacgaggactggctccgctgtcagacggccgggcagcttgcgtagtggccaggtaccactaactatctatactgtaataatgttgtatagccgccggatagctagctagtttagtcattcagcggcgatgggtaataataaagtgtcatccatccatcaccatgcgtggcaacgtgagcaatgacctgattgaacaaattgaaatgaaaagaagaaatatgttatatgtcaacgagatttcctcataatgccactgacgacgtgtgtccaagaaatgtatcagtgatacgtatattcacaatttttttatgacttatactcacaatttgtttttttactacttatactcacaatttgttgtgcgtaccataacaatttcgatcgaatatatatcagaaagttgacgaaagtaagctcactcaaaaagttaaatgggctgcggaagctgcgtcaggcccaagttttggctattctatccggtatccacgattttgatggctgagggacatatgttcgcttaagcttggcgcgccggtcacccggtccgggcctagaaggccagcttcggccgccccgggggtaccgagctcgaattccaactttgtatagaaaagttgggccgaattcgagctcggtacggccagaatggcccggaccgaagcttgcatgcctgcagtgcagcgtgacccggtcgtgcccctctctagagataatgagcattgcatgtctaagttataaaaaattaccacatattttttttgtcacacttgtttgaagtgcagtttatctatctttatacatatatttaaactttactctacgaataatataatctatagtactacaataatatcagtgttttagagaatcatataaatgaacagttagacatggtctaaaggacaattgagtattttgacaacaggactctacagttttatctttttagtgtgcatgtgttctcctttttttttgcaaatagcttcacctatataatacttcatccattttattagtacatccatttagggtttagggttaatggtttttatagactaatttttttagtacatctattttattctattttagcctctaaattaagaaaactaaaactctattttagtttttttatttaataatttagatataaaatagaataaaataaagtgactaaaaattaaacaaataccctttaagaaattaaaaaaactaaggaaacatttttcttgtttcgagtagataatgccagcctgttaaacgccgtcgacgagtctaacggacaccaaccagcgaaccagcagcgtcgcgtcgggccaagcgaagcagacggcacggcatctctgtcgctgcctctggacccctctcgagagttccgctccaccgttggacttgctccgctgtcggcatccagaaattgcgtggcggagcggcagacgtgagccggcacggcaggcggcctcctcctcctctcacggcaccggcagctacgggggattcctttcccaccgctccttcgctttcccttcctcgcccgccgtaataaatagacaccccctccacaccctctttccccaacctcgtgttgttcggagcgcacacacacacaaccagatctcccccaaatccacccgtcggcacctccgcttcaaggtacgccgctcgtcctcccccccccccctctctaccttctctagatcggcgttccggtccatgcatggttagggcccggtagttctacttctgttcatgtttgtgttagatccgtgtttgtgttagatccgtgctgctagcgttcgtacacggatgcgacctgtacgtcagacacgttctgattgctaacttgccagtgtttctctttggggaatcctgggatggctctagccgttccgcagacgggatcgatttcatgattttttttgtttcgttgcatagggtttggtttgcccttttcctttatttcaatatatgccgtgcacttgtttgtcgggtcatcttttcatgcttttttttgtcttggttgtgatgatgtggtctggttgggcggtcgttctagatcggagtagaattctgtttcaaactacctggtggatttattaattttggatctgtatgtgtgtgccatacatattcatagttacgaattgaagatgatggatggaaatatcgatctaggataggtatacatgttgatgcgggttttactgatgcatatacagagatgctttttgttcgcttggttgtgatgatgtggtgtggttgggcggtcgttcattcgttctagatcggagtagaatactgtttcaaactacctggtgtatttattaattttggaactgtatgtgtgtgtcatacatcttcatagttacgagtttaagatggatggaaatatcgatctaggataggtatacatgttgatgtgggttttactgatgcatatacatgatggcatatgcagcatctattcatatgctctaaccttgagtacctatctattataataaacaagtatgttttataattattttgatcttgatatacttggatgatggcatatgcagcagctatatgtggatttttttagccctgccttcatacgctatttatttgcttggtactgtttcttttgtcgatgctcaccctgttgtttggtgttacttctgcaggtcgatgaaacagatcaacaactggtttatcaatcaaaggaagcggcactggaaaggtggaggcggcagcggtggcggaggctccggaggcggtggcatgggcgagagcgtcaaggcaataaaattaaagatcctcgacatgttcctcgaccccgagtgcaccaagcaggtaagtttctgcttctacctttgatatatatataataattatcattaattagtagtaatataatatttcaaatatttttttcaaaataaaagaatgtagtatatagcaattgcttttctgtagtttataagtgtgtatattttaatttataacttttctaatatatgaccaaaacatggtgatgtgcaggacgacaactggcgcaaggacctcagcaccatgagccgcttctgcggcgaggccggcaacatgtgcctcagggacctctacaactacttcagcatgcccaaggaggaccgcatcagctccaaggacttatataacgccatgtaccataaaactaagctcctccaccccggcctccccgggaaggtggctaaccaaatcgtcaaccacgccaaggacgtctggaagcgcaacgccaagctcatctaccgcaaccaaatcagcatgcccacatataagatcaccaccgcccccatccgcctccaaaataacatctacaaattaataaaaaataagaacaaatacataatcgacgtccagctctacagcaaggagtacagcaaggacagcggcaagggcacccacaggtacttcctcgtcgccgtcagggacagcagcaccaggatgatcttcgacaggatcatgagcaaggaccacatcgacagcagcaagagctacacccagggccagctccaaatcaagaaggaccaccagggcaagtggtactgcatcatcccctatacattccccacccacgaaaccgtcctcgaccccgacaaggtcatgggcgtcgacctcggggtggctaaggccgtctactgggctttcaacagcagctataaaagaggctgcatcgacggcggcgagatcgagcacttcaggaagatgatcagggcccggcgcgtcagcatccagaatcaaatcaaacacagcggcgacgcccgcaagggccacggcaggaagagggccctcaagcccatcgaaaccctcagcgagaaggagaagaacttccgcgacacaataaaccacaggtacgccaacaggatcgtcgaggccgctatcaagcagggctgcggcaccatccagatcgagaacctcgagggcatcgctgacaggaccggcagcaagttcctcaagaactggccctactacgacctccagaccaagatcgtcaataaagccaaggagcacggcatcaccgtcgtcgcaataaacccccagtatacatcccagcgctgcagcatgtgcggctacatcgagaaaaccaacaggagcagccaggccgtgttcgagtgcaagcagtgcggctacggcagccgcaccatctgcatcaactgcaggcacgtccaagtctccggcgacgtctgcgaggagtgcggcggcatcgtcaagaaggagaacgtcaacgccgactacaacgccgccaagaacatcagcaccccctacatcgaccagataataatggagaagtgcctcgagctcggcatcccctaccgctccatcacctgcaaggagtgcggccacatccaggctagcggcaacacctgcgaggtctgcggcagcaccaacatcctcaaaccaaagaagatccgcaaggcaaaaagcagggccgacccgaagaagaagcgcaaggtgtaggtaccgtcatgggtcgtttaagctgccgatgtgcctgcgtcgtctggtgccctctctccatatggaggttgtcaaagtatctgctgttcgtgtcatgagtcgtgtcagtgttggtttaataatggaccggttgtgttgtgtgtgcgtactacccagaactatgacaaatcatgaataagtttgatgtttgaaattaaagcctgtgctcattatgttctgtctttcagttgtctcctaatatttgcctgcaggtactggctatctaccgtttcttacttaggaggtgtttgaatgcactaaaactaatagttagtggctaaaattagttaaaacatccaaacaccatagctaatagttgaactattagctatttttggaaaattagttaatagtgaggtagttatttgttagctagctaattcaactaacaatttttagccaactaacaattagtttcagtgcattcaaacacccccttaatgttaacgtggttctatctaccgtctcctaatatatggttgattgttcggtttgttgctatgctattgggttctgattgctgctagttcttgctgaatccagaagttctcgtagtatagctcagattcatattatttatttgagtgataagtgatccaggttattactatgttagctaggttttttttacaaggataaattatctgtgatcataattcttatgaaagctttatgtttcctggaggcagtggcatgcaatgcatgacagcaacttgatcacaccagctgaggtagatacggtaacaaggttcttaaatctgttcaccaaatcattggagaacacacatacacattcttgccagtcttggttagagaaatttcatgacaaaatgccaaagctgtcttgactcttcacttttggccatgagtcgtgacactttaacttagcctaggatccatggcacccgggttaacggcaaacgctaattagtcactaggcccaggaaacactaactaagccctagcttatcctagcgcaacctagttaggtcttccccaagtttgtacaaaaaagcaggctccggccagaatggcccggaccgggttaccgaattcgagctcggtaccctgggatccgatatcgatgggccctggccgaagctttgagagtacaatgatgaacctagattaatcaatgccaaagtctgaaaaatgcaccctcagtctatgatccagaaaatcaagattgcttgaggccctgttcggttgttccggattagagccccggattaattcctagccggattacttctctaatttatatagattttgatgagctggaatgaatcctggcttattccggtacaaccgaacaggccctgaaggataccagtaatcgctgagctaaattggcatgctgtcagagtgtcagtattgcagcaaggtagtgagataaccggcatcatggtgccagtttgatggcaccattagggttagagatggtggccatgggcgcatgtcctggccaactttgtatgatatatggcagggtgaataggaaagtaaaattgtattgtaaaaagggatttcttctgtttgttagcgcatgtacaaggaatgcaagttttgagcgagggggcatcaaagatctggctgtgtttccagctgtttttgttagccccatcgaatccttgacataatgatcccgcttaaataagcaacctcgcttgtatagttccttgtgctctaacacacgatgatgataagtcgtaaaatagtggtgtccaaagaatttccaggcccagttgtaaaagctaaaatgctattcgaatttctactagcagtaagtcgtgtttagaaattatttttttatataccttttttccttctatgtacagtaggacacagtgtcagcgccgcgttgacggagaatatttgcaaaaaagtaaaagagaaagtcatagcggcgtatgtgccaaaaacttcgtcacagagagggccataagaaacatggcccacggcccaatacgaagcaccgcgacgaagcccaaacagcagtccgtaggtggagcaaagcgctgggtaatacgcaaacgttttgtcccaccttgactaatcacaagagtggagcgtaccttataaaccgagccgcaagcaccgaattgcccaaaacgctttcccgatgttttagagctagaaatagcaagttaaaataaggctagtccgttatcaacttgaaaaagtggcaccgagtcggtgctttttttttgcggccgcgaattcctgcagggccctcttgtcggaccagttgcccaccacgttggtgaggggcacccagctttcttgtacaaagtggccgttaacggatcggccagaatggcccggaccgggttaccgaattcgagctcggtaccctgggatccgatatcgatgggccctggccgaagctttgagagtacaatgatgaacctagattaatcaatgccaaagtctgaaaaatgcaccctcagtctatgatccagaaaatcaagattgcttgaggccctgttcggttgttccggattagagccccggattaattcctagccggattacttctctaatttatatagattttgatgagctggaatgaatcctggcttattccggtacaaccgaacaggccctgaaggataccagtaatcgctgagctaaattggcatgctgtcagagtgtcagtattgcagcaaggtagtgagataaccggcatcatggtgccagtttgatggcaccattagggttagagatggtggccatgggcgcatgtcctggccaactttgtatgatatatggcagggtgaataggaaagtaaaattgtattgtaaaaagggatttcttctgtttgttagcgcatgtacaaggaatgcaagttttgagcgagggggcatcaaagatctggctgtgtttccagctgtttttgttagccccatcgaatccttgacataatgatcccgcttaaataagcaacctcgcttgtatagttccttgtgctctaacacacgatgatgataagtcgtaaaatagtggtgtccaaagaatttccaggcccagttgtaaaagctaaaatgctattcgaatttctactagcagtaagtcgtgtttagaaattatttttttatataccttttttccttctatgtacagtaggacacagtgtcagcgccgcgttgacggagaatatttgcaaaaaagtaaaagagaaagtcatagcggcgtatgtgccaaaaacttcgtcacagagagggccataagaaacatggcccacggcccaatacgaagcaccgcgacgaagcccaaacagcagtccgtaggtggagcaaagcgctgggtaatacgcaaacgttttgtcccaccttgactaatcacaagagtggagcgtaccttataaaccgagccgcaagcaccgaattgcaatataaaattaccgatgttttagagctagaaatagcaagttaaaataaggctagtccgttatcaacttgaaaaagtggcaccgagtcggtgctttttttttgcggccgcgaattcctgcagggccctcttgtcggaccagttgcccaccacgttggtgaggggcaactttattatacaaagttgattccgattaatcgtggcctcttgctcttcaggatgaagagctatgtttaaacgtgcaagcgctactagacaattcagtacattaaaaacgtccgcaatgtgttattaagttgtctaagcgtcaatttgtttacaccacaatatatcctgcca

SEQ ID NO: 55 - DNA, 9387 bp, Artificial sequence
  Synthetic
gtttacccgccaatatatcctgtcaaacactgcggccgcacttgaggccgagctcggtacggccagaatggcccggaccgggttaccaagcggccgcggtcacccggtccgggcctagaaggccagcttcaagtttgtacaaagtggccgttaacggatcggccagaatggcccggaccgaagccgaggccggcctcccggcggatctcgactctagaggatcgctcaggaaggccctctagaactagtggatctcgatgtgtagtctacgagaagggttaaccgtctcttcgtgagaataaccgtggcctaaaaataagccgatgaggataaataaaatgtggtggtacagtacttcaagaggtttactcatcaagaggatgcttttccgatgagctctagtagtacatcggacctcacatacctccattgtggtgaaatattttgtgctcatttagtgatgggtaaattttgtttatgtcactctaggttttgacatttcagttttgccactcttaggttttgacaaataatttccattccgcggcaaaagcaaaacaattttattttacttttaccactcttagctttcacaatgtatcacaaatgccactctagaaattctgtttatgccacagaatgtgaaaaaaaacactcacttatttgaagccaaggtgttcatggcatggaaatgtgacataaagtaacgttcgtgtataagaaaaaattgtactcctcgtaacaagagacggaaacatcatgagacaatcgcgtttggaaggctttgcatcacctttggatgatgcgcatgaatggagtcgtctgcttgctagccttcgcctaccgcccactgagtccgggcggcaactaccatcggcgaacgacccagctgacctctaccgaccggacttgaatgcgctaccttcgtcagcgacgatggccgcgtacgctggcgacgtgcccccgcatgcatggcggcacatggcgagctcagaccgtgcgtggctggctacaaatacgtaccccgtgagtgccctagctagaaacttacacctgcaactgcgagagcgagcgtgtgagtgtagccgagtagctgagatagagccatggggaggagggcgtgttgcgcgaaggaaggcgttaagagaggggcgtggacgagcaaggaggacgatgccttggccgcctacgtcaaggcccacggcgaaggcaaatggagggaagtgccccagaaagccggtttgcgtcggtgcggcaagagctgccggctgcggtggctgaactacctccggcccaacatcaggcgcggcaacatctcctacgacgaggaggatctcatcatccgcctccacaggctcctcggcaacaggtggtcgctgattgcaggcaggctgcctggccgaacagacaatgaaatcaagaactactggaacagcacgctgggccggagggcaggcgccggcgccggcgccggcggcagatccacgatggcgctttcagcttcccgagttcagcaggcggaagaactgctgcaacgacctgctgagaggcagctgatgaggagccagcttgctgcagccgccaggagcatcaactggagctacgccctcttctggtccatttcagacactcaaccaggggtgctgacgtggacggacgggttctacaacggcgaggtgaagacgcggaagatttccaactccgtggagctgacatccgaccagctcgtcatgcagaggagcgaccagctccgggagctctacgaggccctcctgtcgggcgagggcgaccgccgcgctgcgcctgcgcggccggccggctctctgtcgccggaggacctcggcgacaccgagtggtactacgtggtgtccatgacctacgccttccggccaggccaagggttgcccggcaggagtttcgcgagcgacgagcatgtctggctgtgcaacgcgcacctcgccggcagcaaagccttcccccgcgcgctcctcgccaagagcgcgtccattcagtcaatcctctgcatcccggttatgggcggcgtgcttgagcttggtacaactgacacggtgccggaggccccggacttggtcagccgagcaaccgcggctttctgggagccgcagtgcccgagctccagcccgtcaggacgagcaaacgagacgggcgaggccgcagcagacgacggcacgtttgcgttcgaggaactcgaccacaataatggcatggacgacatagaggcgatgaccgccgccgggggacacgggcaggaggaggagctaagactaagagaagccgaggccctgtcagacgacgcaagcctggagcacatcaccaaggagatcgaggagttctacagcctctgcgacgaaatggacctgcaggcgctaccactaccgctagaggacggctggaccgtggacgcgtccaatttcgaggtcccctgctcttccccgcagccagcgccgcctccggtggatagggctaccgctaacgtcgccgccgacgcctcaagggcacccgtctacggctctcgcgcgacgagtttcatggcttggacgaggtcctcgcagcagtcgtcgtgctccgacgacgcggcgcccgcagcagtagtgccggccatcgaggagccgcagagattgctgaagaaagtggtggccggcggcggtgcttgggagagctgtggcggcgcgacgggagcagcacaggaaatgagtggcactggcaccaagaaccacgtcatgtcggagcgaaagcgacgagagaagctcaacgagatgttcctcgtcctcaagtcactgcttccgtccattcacagggtgaacaaagcgtcgatcctcgccgaaacgatagcctacctcaaggagcttcagagaagggtgcaagagctggagtccagtagggaacctgcgtcgcgcccatccgaaacgacgacaaggctaataacaaggccctcccgtggcaataatgagagtgtgaggaaggaggtctgcgcgggctccaagaggaagagcccagagctcggcagagacgacgtggagcgccccccggtcctcacgatggacgccggcaccagcaacgtcaccgtcaccgtctcggacaaggatgtgctcctggaggtgcagtgccggtgggaggagctcctgatgacgcgagtgttcgacgccatcaagagcctccatttggacgtcctctcggttcaggcttcagcgccagatggcttcatggggcttaagatacgagctcagtttgctggctccggtgccgtcgtgccctggatgatcagcgaggctcttcgcaaagctatagggaacccctgggtcgtcgtcgcgccggacaccggctcgcacgccaccccggccgcgacgtcgggcgcctgcgagacgggccagaatagcgccgctcatcgcgcggaccccgactcagccgggacgacgacgacctcggcggcggcggtgtgggcgcccaaggccgtgcggtgcacgggcggactcttcttcttccaccgggacacgacgccggcgcacgcgggcgagacggcgacgccaatggccggtggaggtggaggaggaggaggagaagcagggtcgtcggacgactgcagctcggcggcgtcggtatcgcttcgcgtcggaagccacgacgagccgtgcttctccggcgacggtgacggcgactggatggacgacgtgagggccctggcgtcgtttctggagtccgacgaggactggctccgctgtcagacggccgggcagcttgcgtagtggccaggtaccactaactatctatactgtaataatgttgtatagccgccggatagctagctagtttagtcattcagcggcgatgggtaataataaagtgtcatccatccatcaccatgcgtggcaacgtgagcaatgacctgattgaacaaattgaaatgaaaagaagaaatatgttatatgtcaacgagatttcctcataatgccactgacgacgtgtgtccaagaaatgtatcagtgatacgtatattcacaatttttttatgacttatactcacaatttgtttttttactacttatactcacaatttgttgtgcgtaccataacaatttcgatcgaatatatatcagaaagttgacgaaagtaagctcactcaaaaagttaaatgggctgcggaagctgcgtcaggcccaagttttggctattctatccggtatccacgattttgatggctgagggacatatgttcgcttaagcttggcgcgccggtcacccggtccgggcctagaaggccagcttcggccgccccgggggtaccgagctcgaattccaactttgtatagaaaagttgggccgaattcgagctcggtacggccagaatggcccggaccgaagcttgcatgcctgcagtgcagcgtgacccggtcgtgcccctctctagagataatgagcattgcatgtctaagttataaaaaattaccacatattttttttgtcacacttgtttgaagtgcagtttatctatctttatacatatatttaaactttactctacgaataatataatctatagtactacaataatatcagtgttttagagaatcatataaatgaacagttagacatggtctaaaggacaattgagtattttgacaacaggactctacagttttatctttttagtgtgcatgtgttctcctttttttttgcaaatagcttcacctatataatacttcatccattttattagtacatccatttagggtttagggttaatggtttttatagactaatttttttagtacatctattttattctattttagcctctaaattaagaaaactaaaactctattttagtttttttatttaataatttagatataaaatagaataaaataaagtgactaaaaattaaacaaataccctttaagaaattaaaaaaactaaggaaacatttttcttgtttcgagtagataatgccagcctgttaaacgccgtcgacgagtctaacggacaccaaccagcgaaccagcagcgtcgcgtcgggccaagcgaagcagacggcacggcatctctgtcgctgcctctggacccctctcgagagttccgctccaccgttggacttgctccgctgtcggcatccagaaattgcgtggcggagcggcagacgtgagccggcacggcaggcggcctcctcctcctctcacggcaccggcagctacgggggattcctttcccaccgctccttcgctttcccttcctcgcccgccgtaataaatagacaccccctccacaccctctttccccaacctcgtgttgttcggagcgcacacacacacaaccagatctcccccaaatccacccgtcggcacctccgcttcaaggtacgccgctcgtcctcccccccccccctctctaccttctctagatcggcgttccggtccatgcatggttagggcccggtagttctacttctgttcatgtttgtgttagatccgtgtttgtgttagatccgtgctgctagcgttcgtacacggatgcgacctgtacgtcagacacgttctgattgctaacttgccagtgtttctctttggggaatcctgggatggctctagccgttccgcagacgggatcgatttcatgattttttttgtttcgttgcatagggtttggtttgcccttttcctttatttcaatatatgccgtgcacttgtttgtcgggtcatcttttcatgcttttttttgtcttggttgtgatgatgtggtctggttgggcggtcgttctagatcggagtagaattctgtttcaaactacctggtggatttattaattttggatctgtatgtgtgtgccatacatattcatagttacgaattgaagatgatggatggaaatatcgatctaggataggtatacatgttgatgcgggttttactgatgcatatacagagatgctttttgttcgcttggttgtgatgatgtggtgtggttgggcggtcgttcattcgttctagatcggagtagaatactgtttcaaactacctggtgtatttattaattttggaactgtatgtgtgtgtcatacatcttcatagttacgagtttaagatggatggaaatatcgatctaggataggtatacatgttgatgtgggttttactgatgcatatacatgatggcatatgcagcatctattcatatgctctaaccttgagtacctatctattataataaacaagtatgttttataattattttgatcttgatatacttggatgatggcatatgcagcagctatatgtggatttttttagccctgccttcatacgctatttatttgcttggtactgtttcttttgtcgatgctcaccctgttgtttggtgttacttctgcaggtcgatgaaacagatcaacaactggtttatcaatcaaaggaagcggcactggaaaggtggaggcggcagcggtggcggaggctccggaggcggtggcatgggcgagagcgtcaaggcaataaaattaaagatcctcgacatgttcctcgaccccgagtgcaccaagcaggtaagtttctgcttctacctttgatatatatataataattatcattaattagtagtaatataatatttcaaatatttttttcaaaataaaagaatgtagtatatagcaattgcttttctgtagtttataagtgtgtatattttaatttataacttttctaatatatgaccaaaacatggtgatgtgcaggacgacaactggcgcaaggacctcagcaccatgagccgcttctgcggcgaggccggcaacatgtgcctcagggacctctacaactacttcagcatgcccaaggaggaccgcatcagctccaaggacttatataacgccatgtaccataaaactaagctcctccaccccggcctccccgggaaggtggctaaccaaatcgtcaaccacgccaaggacgtctggaagcgcaacgccaagctcatctaccgcaaccaaatcagcatgcccacatataagatcaccaccgcccccatccgcctccaaaataacatctacaaattaataaaaaataagaacaaatacataatcgacgtccagctctacagcaaggagtacagcaaggacagcggcaagggcacccacaggtacttcctcgtcgccgtcagggacagcagcaccaggatgatcttcgacaggatcatgagcaaggaccacatcgacagcagcaagagctacacccagggccagctccaaatcaagaaggaccaccagggcaagtggtactgcatcatcccctatacattccccacccacgaaaccgtcctcgaccccgacaaggtcatgggcgtcgacctcggggtggctaaggccgtctactgggctttcaacagcagctataaaagaggctgcatcgacggcggcgagatcgagcacttcaggaagatgatcagggcccggcgcgtcagcatccagaatcaaatcaaacacagcggcgacgcccgcaagggccacggcaggaagagggccctcaagcccatcgaaaccctcagcgagaaggagaagaacttccgcgacacaataaaccacaggtacgccaacaggatcgtcgaggccgctatcaagcagggctgcggcaccatccagatcgagaacctcgagggcatcgctgacaggaccggcagcaagttcctcaagaactggccctactacgacctccagaccaagatcgtcaataaagccaaggagcacggcatcaccgtcgtcgcaataaacccccagtatacatcccagcgctgcagcatgtgcggctacatcgagaaaaccaacaggagcagccaggccgtgttcgagtgcaagcagtgcggctacggcagccgcaccatctgcatcaactgcaggcacgtccaagtctccggcgacgtctgcgaggagtgcggcggcatcgtcaagaaggagaacgtcaacgccgactacaacgccgccaagaacatcagcaccccctacatcgaccagataataatggagaagtgcctcgagctcggcatcccctaccgctccatcacctgcaaggagtgcggccacatccaggctagcggcaacacctgcgaggtctgcggcagcaccaacatcctcaaaccaaagaagatccgcaaggcaaaaagcagggccgacccgaagaagaagcgcaaggtgtaggtaccgtcatgggtcgtttaagctgccgatgtgcctgcgtcgtctggtgccctctctccatatggaggttgtcaaagtatctgctgttcgtgtcatgagtcgtgtcagtgttggtttaataatggaccggttgtgttgtgtgtgcgtactacccagaactatgacaaatcatgaataagtttgatgtttgaaattaaagcctgtgctcattatgttctgtctttcagttgtctcctaatatttgcctgcaggtactggctatctaccgtttcttacttaggaggtgtttgaatgcactaaaactaatagttagtggctaaaattagttaaaacatccaaacaccatagctaatagttgaactattagctatttttggaaaattagttaatagtgaggtagttatttgttagctagctaattcaactaacaatttttagccaactaacaattagtttcagtgcattcaaacacccccttaatgttaacgtggttctatctaccgtctcctaatatatggttgattgttcggtttgttgctatgctattgggttctgattgctgctagttcttgctgaatccagaagttctcgtagtatagctcagattcatattatttatttgagtgataagtgatccaggttattactatgttagctaggttttttttacaaggataaattatctgtgatcataattcttatgaaagctttatgtttcctggaggcagtggcatgcaatgcatgacagcaacttgatcacaccagctgaggtagatacggtaacaaggttcttaaatctgttcaccaaatcattggagaacacacatacacattcttgccagtcttggttagagaaatttcatgacaaaatgccaaagctgtcttgactcttcacttttggccatgagtcgtgacactttaacttagcctaggatccatggcacccgggttaacggcaaacgctaattagtcactaggcccaggaaacactaactaagccctagcttatcctagcgcaacctagttaggtcttcccattccgattaatcgtggcctcttgctcttcaggatgaagagctatgtttaaacgtgcaagcgctactagacaattcagtacattaaaaacgtccgcaatgtgttattaagttgtctaagcgtcaatttgtttacaccacaatatatcctgcca

SEQ ID NO: 56 - DNA, 9675 bp, Artificial sequence
  Synthetic
gtttacccgccaatatatcctgtcaaacactgcggccgcacttgaggccgagctcggtacggccagaatggcccggaccgggttaccaagcggccgcatcgagcagctggcttgtggggaccagacaaaaaaggaatggtgcagaattgttaggcgcacctaccaaaagcatctttgcctttattgcaaagataaagcagattcctctagtacaagtggggaacaaaataacgtggaaaagagctgtcctgacagcccactcactaatgcgtatgacgaacgcagtgacgaccacaaaactcgagcaacgagatcatgagccaatcaaagaggagtgatgtagacctaaagcaataatggagccatgacgtaagggcttacgcccatacgaaataattaaaggctgatgtgacctgtcggtctctcagaacctttactttttatgtttggcgtgtatttttaaatttccacggcaatgacgatgtgaccgtcgacccactaaaacattgctttgtcaaaagctaaaaaagatgatgcccgacagccacttgtgtgaagcatgagaagccggtccctccactaagaaaattagtgaagcatcttccagtggtccctccactcacagctcaatcagtgagcaacaggacgaaggaaatgacgtaagccatgacgtctaatcccagggcccggtgaccaatcgaattcttaccctagctccctgcggctgttacgcggtcccccatcaatcttctgttcttgcggttgtagcctgtgtaacagtgctagagtatgtatgataaataggttttaagtctgcttacatgacattttttattgtggaagagacatataaaaattagagagagtggttctcatgcaacggcggacggcccggtgctaaaagagcttcaagacaaaataatgaaacaggaagagagtagatttatctaagagccaactttattatatgaatgtgtttattgttggctttagatgatatggtaaggagttagagctaataatagataggctctattattattattattaattaaactcgctctaaggaggaaagtgggaggaagggacgaggacgaagactactggaagcatcgtgcatggatgatggatgtggtgtctcttaatgtaggtggccggaggatgtacgtgttaattgcgcgataagcactcagatccaaccgcaaactacctccacactgacacactgatagagagaaagagagacctccgacgactgccgccgcagatgagccacgtacgtatacgacgtctgccggccggctcaggctgccgccatcaccctgctcgaaagtcgcgttaggcggcgccagctacataggagtatctagtctagccagttagtatactactactgcgctgatgatgaattaactctgcatagatactgtacttgcctccctccaacacccaaccacctcctgctcggctcttaataacttggacacggatcgatgccatccaaggaagaacacgacgacgacgacggaacatccaccatgcaagcttgcatccatacgccgatacgcgtgcatccatccatccaccattatttccattttccaccgatcacacgtacacaggcctatttaaggagcgacatcccactgcaactctcctcaccactcatcaccagctagctctagcaaagcacttgccatctaccgaccgccgcattccaaacagcccgacgagctagcagagcggcaggcacctccctcctcaaggaacccatggcggccaatgcgggcggcggtggagcgggaggaggcagcggcagcggcagcgtggctgcgccggcggtgtgccgccccagcggctcgcggtggacgccgacgccggagcagatcaggatgctgaaggagctctactacggctgcggcatccggtcgcccagctcggagcagatccagcgcatcaccgccatgctgcggcagcacggcaagatcgagggcaagaacgtcttctactggttccagaaccacaaggcccgcgagcgccagaagcgccgcctcaccagcctcgacgtcaacgtgcccgccgccggcgcggccgacgccaccaccagccaactcggcgtcctctcgctgtcgtcgccgccgccttcaggcgcggcgcctccctcgcccaccctcggcttctacgccgccggcaatggcggcggatcggctgtgctgctggacacgagttccgactggggcagcagcggcgctgctatggccaccgagacatgcttcctgcaggactacatgggcgtgacggacacgggcagctcgtcgcagtggccacgcttctcgtcgtcggacacgataatggcggcggccgcggcgcgggcggcgacgacgcgggcgcccgagacgctccctctcttcccgacctgcggcgacgacggcggcagcggtagcagcagctacttgccgttctggggtgccgcgtccacaactgccggcgccacttcttccgttgcgatccaacagcaacaccagctgcaggagcagtacagcttttacagcaacagcaacagcacccagctggccggcaccggcaaccaagacgtatcggcaacagcagcagcagccgccgccctggagctgagcctcagctcatggtgctccccttaccctgctgcagggagtatgtgagagcaacgcgagctgccactgctcttcactgatgtctctggaatggaaggaggaggaagtgagaacagatcattcgacaaagcagcattagtccgttgatcggtggaagaccactcgtcagtgttgagttgaatgtttgatcaataaaatacggcaatgctgtaagggttgttttttatgccattgataatacactgtactgttcagttgttgaactctatttcttagccatgccaagtgcttttcttattttgaataacattacagcaaaaagttgaaagacaaaaaaaaaaacccccgaacagagtgctttgggtcccaagcttctttagactgtgttcggcgttccccctaaatttctccccctatatctcactcacttgtcacatcagcgttctctttccccctatatctccacgctctacagcagttccacctatatcaaacctctataccccaccacaacaatattatatactttcatcttcaactaactcatgtaccttccaatttttttctactaataattatttacgtgcacagaaacttagcaaggagagagagagcggggtcacccggtccgggcctagaaggccagcttcaagtttgtacaaagtggccgttaacggatcggccagaatggcccggaccgaagccgaggccggccgctccggccagaatggcccggaccgggttaccgaattcgagctcggtaccctgggatccgatatcgatgggccctggccgaagctttgagagtacaatgatgaacctagattaatcaatgccaaagtctgaaaaatgcaccctcagtctatgatccagaaaatcaagattgcttgaggccctgttcggttgttccggattagagccccggattaattcctagccggattacttctctaatttatatagattttgatgagctggaatgaatcctggcttattccggtacaaccgaacaggccctgaaggataccagtaatcgctgagctaaattggcatgctgtcagagtgtcagtattgcagcaaggtagtgagataaccggcatcatggtgccagtttgatggcaccattagggttagagatggtggccatgggcgcatgtcctggccaactttgtatgatatatggcagggtgaataggaaagtaaaattgtattgtaaaaagggatttcttctgtttgttagcgcatgtacaaggaatgcaagttttgagcgagggggcatcaaagatctggctgtgtttccagctgtttttgttagccccatcgaatccttgacataatgatcccgcttaaataagcaacctcgcttgtatagttccttgtgctctaacacacgatgatgataagtcgtaaaatagtggtgtccaaagaatttccaggcccagttgtaaaagctaaaatgctattcgaatttctactagcagtaagtcgtgtttagaaattatttttttatataccttttttccttctatgtacagtaggacacagtgtcagcgccgcgttgacggagaatatttgcaaaaaagtaaaagagaaagtcatagcggcgtatgtgccaaaaacttcgtcacagagagggccataagaaacatggcccacggcccaatacgaagcaccgcgacgaagcccaaacagcagtccgtaggtggagcaaagcgctgggtaatacgcaaacgttttgtcccaccttgactaatcacaagagtggagcgtaccttataaaccgagccgcaagcaccgaattgcccaaaacgctttcccgatgttttagagctagaaatagcaagttaaaataaggctagtccgttatcaacttgaaaaagtggcaccgagtcggtgctttttttttgcggccgcgaattcctgcagggccctcttgtcggaccagttgcccaccacgttggtgaggggcacccagctttcttgtacaaagtggccgttaacggatcggccagaatggcccggaccgggttaccgaattcgagctcggtaccctgggatccgatatcgatgggccctggccgaagctttgagagtacaatgatgaacctagattaatcaatgccaaagtctgaaaaatgcaccctcagtctatgatccagaaaatcaagattgcttgaggccctgttcggttgttccggattagagccccggattaattcctagccggattacttctctaatttatatagattttgatgagctggaatgaatcctggcttattccggtacaaccgaacaggccctgaaggataccagtaatcgctgagctaaattggcatgctgtcagagtgtcagtattgcagcaaggtagtgagataaccggcatcatggtgccagtttgatggcaccattagggttagagatggtggccatgggcgcatgtcctggccaactttgtatgatatatggcagggtgaataggaaagtaaaattgtattgtaaaaagggatttcttctgtttgttagcgcatgtacaaggaatgcaagttttgagcgagggggcatcaaagatctggctgtgtttccagctgtttttgttagccccatcgaatccttgacataatgatcccgcttaaataagcaacctcgcttgtatagttccttgtgctctaacacacgatgatgataagtcgtaaaatagtggtgtccaaagaatttccaggcccagttgtaaaagctaaaatgctattcgaatttctactagcagtaagtcgtgtttagaaattatttttttatataccttttttccttctatgtacagtaggacacagtgtcagcgccgcgttgacggagaatatttgcaaaaaagtaaaagagaaagtcatagcggcgtatgtgccaaaaacttcgtcacagagagggccataagaaacatggcccacggcccaatacgaagcaccgcgacgaagcccaaacagcagtccgtaggtggagcaaagcgctgggtaatacgcaaacgttttgtcccaccttgactaatcacaagagtggagcgtaccttataaaccgagccgcaagcaccgaattgcaatataaaattaccgatgttttagagctagaaatagcaagttaaaataaggctagtccgttatcaacttgaaaaagtggcaccgagtcggtgctttttttttgcggccgcgaattcctgcagggccctcttgtcggaccagttgcccaccctgcccttaaggccaattgttcaagattcattcaacaattgaaacatctcccatgattaaatcagtataaggttgctatggtcttgcttgacaaagtttttttttgagggaatttcaactaaatttttgagtgaaactatcaaatactgattttaaaaaatttttataaaaggaagcgcagagataaaaggccatctatgctacaaaagtacccaaaaatgtaatcctaaagtatgaattgcattttttttttgtttggacgaaaggaaaggagtattaccacaagaatgatatcatcttcatatttagatcttttttgggtaaagcttgagattctctaaatatagagaaatcagaagaaaaaaaaaccgtgttttggtggttttgatttctagcctccacaataactttgacggcgtcgacaagtctaacggacaccaagcagcgaaccaccagcgccgagccaagcgaagcagacggccgagacgttgacaccttcggcgcggcatctctcgagagttccgctccggcgctccacctccaccgctggcggtttcttattccgttccgttccgcctcctgctctgctcctctccacaccacacggcacgaaaccgttacggcaccggcagcacccagcacgggagaggggattcctttcccaccgttccttccctttccgccccgccgctataaatagccagccccatccccagcttttttccccaatctcatctcctctctcctgttgttcggagcacacgcacaatccgatcgatccccaaatccccttcgtctctcctcgcgagcctcgtggatcccagcttcaaggtacggcgatcgatcatcccccctccttctctctaccttcttttctctagactacatcggatggcgatccatggttagggcctgctagtttcccttcctgttttgtcgatggctgcgaggcacaatagatctgatggcgttatgacggctaacttgtcatgttgttgcgatttatagtccctttaggagatcagtttaatttctcggatggttcgagatcggtggtccatggttagtaccctaagatccgcgctgttagggttcgtagatggaggcgacctgttctgattgttaacttgtcagtacctgggaaatcctgggatggttctagctcgtccgcagatgagatcgatttcatgatcctctgtatcttgtttcgttgcctaggttccgtctaatctatccgtggtatgatgtagatgttttgatcgtgctaactacgtcttgtaaagttaattgtcaggtcataatttttagcatgcctttttttttgtttggttttgtctaattgggctgtcgttctagatcagagtagaagactgttccaaactacctgctggatttattgaacttggatctgtatgtgtgtcacatatcttcataaattcatgattaagatggattgaaatatcttttatctttttggtatggatagttctatatgttggtgtggctttgttagatgtatacatgcttagatacatgaagcaacgtgctgctactgtttagtaattgctgttcatttgtctaataaacagataaggatatgtatttatgttgctgttggttttgctggtactttgttggatacaaatgcttcaatacagaaaacagcatgctgctacgatttaccatttatctaatcttatcatatgtctaatctaataaacaaacatgcttttaaattatcttcatatgcttggatgatggcatacacagcggctatgtgtggttttttaaatacccagcatcatgggcatgcatgacactgctttaatatgctttttatttgcttgagactgtttcttttgtttatactgaccctttagttcggtgactcttctgcaggtcgactttaacttagcctaggatccatggcccagtccaagcacggcctgaccaaggagatgaccatgaagtaccgcatggagggctgcgtggacggccacaagttcgtgatcaccggcgagggcatcggctaccccttcaagggcaagcaggccatcaacctgtgcgtggtggagggcggccccttgcccttcgccgaggacatcttgtccgccgccttcatgtacggcaaccgcgtgttcaccgagtacccccaggacatcgtcgactacttcaagaactcctgccccgccggctacacctgggaccgctccttcctgttcgaggacggcgccgtgtgcatctgcaacgccgacatcaccgtgagcgtggaggagaactgcatgtaccacgagtccaagttctacggcgtgaacttccccgccgacggccccgtgatgaagaagatgaccgacaactgggagccctcctgcgagaagatcatccccgtgcccaagcagggcatcttgaagggcgacgtgagcatgtacctgctgctgaaggacggtggccgcttgcgctgccagttcgacaccgtgtacaaggccaagtccgtgccccgcaagatgcccgactggcacttcatccagcacaagctgacccgcgaggaccgcagcgacgccaagaaccagaagtggcacctgaccgagcacgccatcgcctccggctccgccttgccctccggactcagatctcgatagggtaccaatggccagttaacagatccagctgctgctgttctagggttcacaagtctgcctatttgtcttccccaatggagctatggttgtctggtctggtccttggtcgtgtcccgtttcattgtgtactatttacctgtaatgtgtatccttaagtctggtttgatggtgtctgaaacgttttgctgtggtagagcagcatggaagaactataatgaataagtgatccctaatcattgtgtccaaattttgcttctgctatacccttttgtgctgtttcttatgttttgcttaaaaatttgatctgacaaacaaatttgtctaaattatgctcttgttctgactgtgtactgtacacatttgtattgctaccggtttggcacatagttttctctttgattgcagatcaaacccttctgattgcagattgcttggctatggctgatgtgctcactgttcttctttagcttgtatattgctgatggtggcttggctacggctgaaaaagttgctgctgcgccgacttggcaactgttgctccagtaatgctttgtcctctcttcctagccgccgacttggcacttggcagctgttgctcctgtaatgcgttgttatctcttatctcttgagatgtactatgattttgaggctgtttgacttgtgccagattgccagtgctgatgctatattatctcaggtttttatgctagtatatgttttactgtgtgctgcctgtgtcgagttacgtaatctattgaaccgctatgcgtgttgatgccctgttgttgcttgccagattgatgcccctgttgcttgcagcttgcaagctgtagtgaaatcctaaaattcgaaaccaaatctattctgaacttttgaagatctgtgatgtccggaagaaaagattcaaacagataaacgggactctccagaatctataaaataaatgatcgacaaacgctttgctttggtaggcttcacgttggtgaggggcaactttattatacaaagttgattccgattaatcgtggcctcttgctcttcaggatgaagagctatgtttaaacgtgcaagcgctactagacaattcagtacattaaaaacgtccgcaatgtgttattaagttgtctaagcgtcaatttgtttacaccacaatatatcctgcca

SEQ ID NO: 57 - DNA, 12809 bp, Artificial sequence
  Synthetic
gtttacccgccaatatatcctgtcaaacactgcggccgcacttgaggccgagctcggtacggccagaatggcccggaccgggttaccaagcggccgcggtcacccggtccgggcctagaaggccagcttcaagtttgtacaaagtggccgttaacggatcggccagaatggcccggaccgaagccgaggccggcctcccggcttcacaaactcaatacaacacacagtggagtagggtattacgctccggcggcccgaaccactctaaatccttgtgtcctcgtgtgctcttccaccattaatgactgtaattgcagggacacgaagagttgtagcgcttttgccaacaagatccgctatatgctagtagagtggaacctgcacagcaacaagcatccaataatctgagaataagaattatgtgtggtgatggttctcatctctgcaactcgccattttcgcgagagaaccaaatccaagttggtgaagatcatgatttgggctcatgggctggcatagtagctattacctttgcaattgtggttcgaatctatccgatattctccttttcagggagagctaatgcttatgcttattgggtattttggtttgacactgcttcacgcccaaaaaaaggcaactatgtctgagttggatatggcccaaaaaaaggcagctatgtctgagttggatatggaagtcttctttcgtttagggtgaagtaagaccaagctcatgagcttattatcttaggtcggaacaaattagttgataggcatggcacatttatcaaattataatgattttaacagaaaagcaacacctctttttcagcagcaccagctttgcaagctgcaattgacactccaagcatagtatttgctccaaactcagcctgcatttcgcacaatatcatatctatttccatttggataaaatatattttccagaaatatgggaacagaatcaagatacagaaaaaagttgtggtagtagtggtaagtggaaacacaagtacagtgaaaagatagcattatttctgaacagtcaaattaaccgaaataagtagtatcacatactgcccctaaattgactacacccaatgtaaagaattgcttgagcatattgagccatcagttgtttgtttgtgtaacggatttgacaatgcagagttcaggagcaaaaaaccgcaaaggagagaaagagggaaaggatctcctagtatcccaccttgtggcgcgccctgtcaagtgcatgatggcctggtcgatctgcgtctgctgctgcggttccatcccaacgagtgcctccgacaccttgtcgttgatcacccgcaccgcgtaggcgacccccctggcgaggaacttccgcctctcggaggccccggccgcgtcggcggcggcgccctcgagcgcgcccacgctagccgtagatgctcggtgcacggccttgttggtgtgcaactcgacctcaacggccggtgcgctacgcccgtcaaggatctggcgcgcccgcaccctcgtgatcacggtgggcgcctcccgcctcatgtggccgacgatgaaaagcgccgggttaggggccttggcgcgcaccgccgtattcagggcctcctcgctcttgcgcgagagcaggtgcttccccaggtactcctgcactgacaaggctgccacagcggtggaatttgtcctcacgacttcgccacgtcgtcctcacctccctggcttcccacgactccgccgtatcgaggtgctcggtgggtcgtcttaatccgaagtccgaactaggaagacgagacagagaggtctgaggaatgggcctcgtttgatgttgagctgaattatttttccagcataagcccaggtcttggtccatgaacaaaattactagaaacccagcccagtactacgatctaaaagagggactgccactggatagctctctctagcattctccacgctccaatacagcggcgtcgtgtctatccgggtctatccgcgaacacgtgagaactctccagaaactgctttctcctccacttcatctctctcgctttccctctataaaaagaccccttctaggaattgagggagacagcaagcaccaagcagcgatccgaagctcaatcaattcactcaaacctcttccccaaatcttcgattagatcttcgttgacaagaagactagaaccgaacctgacggatctcgacatggcggccaatgcgggcggcggtggagcgggaggaggcagcggcagcggcagcgtggctgcgccggcggtgtgccgccccagcggctcgcggtggacgccgacgccggagcagatcaggatgctgaaggagctctactacggctgcggcatccggtcgcccagctcggagcagatccagcgcatcaccgccatgctgcggcagcacggcaagatcgagggcaagaacgtcttctactggttccagaaccacaaggcccgcgagcgccagaagcgccgcctcaccagcctcgacgtcaacgtgcccgccgccggcgcggccgacgccaccaccagccaactcggcgtcctctcgctgtcgtcgccgccgccttcaggcgcggcgcctccctcgcccaccctcggcttctacgccgccggcaatggcggcggatcggctgtgctgctggacacgagttccgactggggcagcagcggcgctgctatggccaccgagacatgcttcctgcaggactacatgggcgtgacggacacgggcagctcgtcgcagtggccacgcttctcgtcgtcggacacgataatggcggcggccgcggcgcgggcggcgacgacgcgggcgcccgagacgctccctctcttcccgacctgcggcgacgacggcggcagcggtagcagcagctacttgccgttctggggtgccgcgtccacaactgccggcgccacttcttccgttgcgatccaacagcaacaccagctgcaggagcagtacagcttttacagcaacagcaacagcacccagctggccggcaccggcaaccaagacgtatcggcaacagcagcagcagccgccgccctggagctgagcctcagctcatggtgctccccttaccctgctgcagggagtatgtgagagcaacgcgagctgccactgctcttcactgatgtctctggaatggaaggaggaggaagtgagaacagatcattcgacaaagcagcattagtccgttgatcggtggaagaccactcgtcagtgttgagttgaatgtttgatcaataaaatacggcaatgctgtaagggttgttttttatgccattgataatacactgtactgttcagttgttgaactctatttcttagccatgccaagtgcttttcttattttgaataacattacagcaaaaagttgaaagacaaaaaaaaaaacccccgaacagagtgctttgggtcccaagcttctttagactgtgttcggcgttccccctaaatttctccccctatatctcactcacttgtcacatcagcgttctctttccccctatatctccacgctctacagcagttccacctatatcaaacctctataccccaccacaacaatattatatactttcatcttcaactaactcatgtaccttccaatttttttctactaataattatttacgtgcacagaaacttagcaaggagagagagagcggtctagaggatcgctcaggaaggccaagcttggcgcgccggtcacccggtccgggcctagaaggccagcttcggccgccccgggggtaccgagctcgaattccaactttgtatagaaaagttgggccgaattcgagctcggtacggccagaatggcccggaccgaagcttgcatgcctgcagtgcagcgtgacccggtcgtgcccctctctagagataatgagcattgcatgtctaagttataaaaaattaccacatattttttttgtcacacttgtttgaagtgcagtttatctatctttatacatatatttaaactttactctacgaataatataatctatagtactacaataatatcagtgttttagagaatcatataaatgaacagttagacatggtctaaaggacaattgagtattttgacaacaggactctacagttttatctttttagtgtgcatgtgttctcctttttttttgcaaatagcttcacctatataatacttcatccattttattagtacatccatttagggtttagggttaatggtttttatagactaatttttttagtacatctattttattctattttagcctctaaattaagaaaactaaaactctattttagtttttttatttaataatttagatataaaatagaataaaataaagtgactaaaaattaaacaaataccctttaagaaattaaaaaaactaaggaaacatttttcttgtttcgagtagataatgccagcctgttaaacgccgtcgacgagtctaacggacaccaaccagcgaaccagcagcgtcgcgtcgggccaagcgaagcagacggcacggcatctctgtcgctgcctctggacccctctcgagagttccgctccaccgttggacttgctccgctgtcggcatccagaaattgcgtggcggagcggcagacgtgagccggcacggcaggcggcctcctcctcctctcacggcaccggcagctacgggggattcctttcccaccgctccttcgctttcccttcctcgcccgccgtaataaatagacaccccctccacaccctctttccccaacctcgtgttgttcggagcgcacacacacacaaccagatctcccccaaatccacccgtcggcacctccgcttcaaggtacgccgctcgtcctcccccccccccctctctaccttctctagatcggcgttccggtccatgcatggttagggcccggtagttctacttctgttcatgtttgtgttagatccgtgtttgtgttagatccgtgctgctagcgttcgtacacggatgcgacctgtacgtcagacacgttctgattgctaacttgccagtgtttctctttggggaatcctgggatggctctagccgttccgcagacgggatcgatttcatgattttttttgtttcgttgcatagggtttggtttgcccttttcctttatttcaatatatgccgtgcacttgtttgtcgggtcatcttttcatgcttttttttgtcttggttgtgatgatgtggtctggttgggcggtcgttctagatcggagtagaattctgtttcaaactacctggtggatttattaattttggatctgtatgtgtgtgccatacatattcatagttacgaattgaagatgatggatggaaatatcgatctaggataggtatacatgttgatgcgggttttactgatgcatatacagagatgctttttgttcgcttggttgtgatgatgtggtgtggttgggcggtcgttcattcgttctagatcggagtagaatactgtttcaaactacctggtgtatttattaattttggaactgtatgtgtgtgtcatacatcttcatagttacgagtttaagatggatggaaatatcgatctaggataggtatacatgttgatgtgggttttactgatgcatatacatgatggcatatgcagcatctattcatatgctctaaccttgagtacctatctattataataaacaagtatgttttataattattttgatcttgatatacttggatgatggcatatgcagcagctatatgtggatttttttagccctgccttcatacgctatttatttgcttggtactgtttcttttgtcgatgctcaccctgttgtttggtgttacttctgcaggtcgatgggcgagagcgtcaaggcaataaaattaaagatcctcgacatgttcctcgaccccgagtgcaccaagcaggtaagtttctgcttctacctttgatatatatataataattatcattaattagtagtaatataatatttcaaatatttttttcaaaataaaagaatgtagtatatagcaattgcttttctgtagtttataagtgtgtatattttaatttataacttttctaatatatgaccaaaacatggtgatgtgcaggacgacaactggcgcaaggacctcagcaccatgagccgcttctgcggcgaggccggcaacatgtgcctcagggacctctacaactacttcagcatgcccaaggaggaccgcatcagctccaaggacttatataacgccatgtaccataaaactaagctcctccaccccggcctccccgggaaggtggctaaccaaatcgtcaaccacgccaaggacgtctggaagcgcaacgccaagctcatctaccgcaaccaaatcagcatgcccacatataagatcaccaccgcccccatccgcctccaaaataacatctacaaattaataaaaaataagaacaaatacataatcgacgtccagctctacagcaaggagtacagcaaggacagcggcaagggcacccacaggtacttcctcgtcgccgtcagggacagcagcaccaggatgatcttcgacaggatcatgagcaaggaccacatcgacagcagcaagagctacacccagggccagctccaaatcaagaaggaccaccagggcaagtggtactgcatcatcccctatacattccccacccacgaaaccgtcctcgaccccgacaaggtcatgggcgtcgacctcggggtggctaaggccgtctactgggctttcaacagcagctataaaagaggctgcatcgacggcggcgagatcgagcacttcaggaagatgatcagggcccggcgcgtcagcatccagaatcaaatcaaacacagcggcgacgcccgcaagggccacggcaggaagagggccctcaagcccatcgaaaccctcagcgagaaggagaagaacttccgcgacacaataaaccacaggtacgccaacaggatcgtcgaggccgctatcaagcagggctgcggcaccatccagatcgagaacctcgagggcatcgctgacaggaccggcagcaagttcctcaagaactggccctactacgacctccagaccaagatcgtcaataaagccaaggagcacggcatcaccgtcgtcgcaataaacccccagtatacatcccagcgctgcagcatgtgcggctacatcgagaaaaccaacaggagcagccaggccgtgttcgagtgcaagcagtgcggctacggcagccgcaccatctgcatcaactgcaggcacgtccaagtctccggcgacgtctgcgaggagtgcggcggcatcgtcaagaaggagaacgtcaacgccgactacaacgccgccaagaacatcagcaccccctacatcgaccagataataatggagaagtgcctcgagctcggcatcccctaccgctccatcacctgcaaggagtgcggccacatccaggctagcggcaacacctgcgaggtctgcggcagcaccaacatcctcaaaccaaagaagatccgcaaggcaaaaagcagggccgacccgaagaagaagcgcaaggtgtaggtaccgtcatgggtcgtttaagctgccgatgtgcctgcgtcgtctggtgccctctctccatatggaggttgtcaaagtatctgctgttcgtgtcatgagtcgtgtcagtgttggtttaataatggaccggttgtgttgtgtgtgcgtactacccagaactatgacaaatcatgaataagtttgatgtttgaaattaaagcctgtgctcattatgttctgtctttcagttgtctcctaatatttgcctgcaggtactggctatctaccgtttcttacttaggaggtgtttgaatgcactaaaactaatagttagtggctaaaattagttaaaacatccaaacaccatagctaatagttgaactattagctatttttggaaaattagttaatagtgaggtagttatttgttagctagctaattcaactaacaatttttagccaactaacaattagtttcagtgcattcaaacacccccttaatgttaacgtggttctatctaccgtctcctaatatatggttgattgttcggtttgttgctatgctattgggttctgattgctgctagttcttgctgaatccagaagttctcgtagtatagctcagattcatattatttatttgagtgataagtgatccaggttattactatgttagctaggttttttttacaaggataaattatctgtgatcataattcttatgaaagctttatgtttcctggaggcagtggcatgcaatgcatgacagcaacttgatcacaccagctgaggtagatacggtaacaaggttcttaaatctgttcaccaaatcattggagaacacacatacacattcttgccagtcttggttagagaaatttcatgacaaaatgccaaagctgtcttgactcttcacttttggccatgagtcgtgacactttaacttagcctaggatccatggcacccgggttaacggcaaacgctaattagtcactaggcccaggaaacactaactaagccctagcttatcctagcgcaacctagttaggtcttcccattccgattaatcgtggcctcttgctcttcaggatgaagagctatgtttaaacgtgcaagcgcctctagaactagtggatctcgatgtgtagtctacgagaagggttaaccgtctcttcgtgagaataaccgtggcctaaaaataagccgatgaggataaataaaatgtggtggtacagtacttcaagaggtttactcatcaagaggatgcttttccgatgagctctagtagtacatcggacctcacatacctccattgtggtgaaatattttgtgctcatttagtgatgggtaaattttgtttatgtcactctaggttttgacatttcagttttgccactcttaggttttgacaaataatttccattccgcggcaaaagcaaaacaattttattttacttttaccactcttagctttcacaatgtatcacaaatgccactctagaaattctgtttatgccacagaatgtgaaaaaaaacactcacttatttgaagccaaggtgttcatggcatggaaatgtgacataaagtaacgttcgtgtataagaaaaaattgtactcctcgtaacaagagacggaaacatcatgagacaatcgcgtttggaaggctttgcatcacctttggatgatgcgcatgaatggagtcgtctgcttgctagccttcgcctaccgcccactgagtccgggcggcaactaccatcggcgaacgacccagctgacctctaccgaccggacttgaatgcgctaccttcgtcagcgacgatggccgcgtacgctggcgacgtgcccccgcatgcatggcggcacatggcgagctcagaccgtgcgtggctggctacaaatacgtaccccgtgagtgccctagctagaaacttacacctgcaactgcgagagcgagcgtgtgagtgtagccgagtagctgagatagagccatggggaggagggcgtgttgcgcgaaggaaggcgttaagagaggggcgtggacgagcaaggaggacgatgccttggccgcctacgtcaaggcccacggcgaaggcaaatggagggaagtgccccagaaagccggtttgcgtcggtgcggcaagagctgccggctgcggtggctgaactacctccggcccaacatcaggcgcggcaacatctcctacgacgaggaggatctcatcatccgcctccacaggctcctcggcaacaggtggtcgctgattgcaggcaggctgcctggccgaacagacaatgaaatcaagaactactggaacagcacgctgggccggagggcaggcgccggcgccggcgccggcggcagatccacgatggcgctttcagcttcccgagttcagcaggcggaagaactgctgcaacgacctgctgagaggcagctgatgaggagccagcttgctgcagccgccaggagcatcaactggagctacgccctcttctggtccatttcagacactcaaccaggggtgctgacgtggacggacgggttctacaacggcgaggtgaagacgcggaagatttccaactccgtggagctgacatccgaccagctcgtcatgcagaggagcgaccagctccgggagctctacgaggccctcctgtcgggcgagggcgaccgccgcgctgcgcctgcgcggccggccggctctctgtcgccggaggacctcggcgacaccgagtggtactacgtggtgtccatgacctacgccttccggccaggccaagggttgcccggcaggagtttcgcgagcgacgagcatgtctggctgtgcaacgcgcacctcgccggcagcaaagccttcccccgcgcgctcctcgccaagagcgcgtccattcagtcaatcctctgcatcccggttatgggcggcgtgcttgagcttggtacaactgacacggtgccggaggccccggacttggtcagccgagcaaccgcggctttctgggagccgcagtgcccgagctccagcccgtcaggacgagcaaacgagacgggcgaggccgcagcagacgacggcacgtttgcgttcgaggaactcgaccacaataatggcatggacgacatagaggcgatgaccgccgccgggggacacgggcaggaggaggagctaagactaagagaagccgaggccctgtcagacgacgcaagcctggagcacatcaccaaggagatcgaggagttctacagcctctgcgacgaaatggacctgcaggcgctaccactaccgctagaggacggctggaccgtggacgcgtccaatttcgaggtcccctgctcttccccgcagccagcgccgcctccggtggatagggctaccgctaacgtcgccgccgacgcctcaagggcacccgtctacggctctcgcgcgacgagtttcatggcttggacgaggtcctcgcagcagtcgtcgtgctccgacgacgcggcgcccgcagcagtagtgccggccatcgaggagccgcagagattgctgaagaaagtggtggccggcggcggtgcttgggagagctgtggcggcgcgacgggagcagcacaggaaatgagtggcactggcaccaagaaccacgtcatgtcggagcgaaagcgacgagagaagctcaacgagatgttcctcgtcctcaagtcactgcttccgtccattcacagggtgaacaaagcgtcgatcctcgccgaaacgatagcctacctcaaggagcttcagagaagggtgcaagagctggagtccagtagggaacctgcgtcgcgcccatccgaaacgacgacaaggctaataacaaggccctcccgtggcaataatgagagtgtgaggaaggaggtctgcgcgggctccaagaggaagagcccagagctcggcagagacgacgtggagcgccccccggtcctcacgatggacgccggcaccagcaacgtcaccgtcaccgtctcggacaaggatgtgctcctggaggtgcagtgccggtgggaggagctcctgatgacgcgagtgttcgacgccatcaagagcctccatttggacgtcctctcggttcaggcttcagcgccagatggcttcatggggcttaagatacgagctcagtttgctggctccggtgccgtcgtgccctggatgatcagcgaggctcttcgcaaagctatagggaacccctgggtcgtcgtcgcgccggacaccggctcgcacgccaccccggccgcgacgtcgggcgcctgcgagacgggccagaatagcgccgctcatcgcgcggaccccgactcagccgggacgacgacgacctcggcggcggcggtgtgggcgcccaaggccgtgcggtgcacgggcggactcttcttcttccaccgggacacgacgccggcgcacgcgggcgagacggcgacgccaatggccggtggaggtggaggaggaggaggagaagcagggtcgtcggacgactgcagctcggcggcgtcggtatcgcttcgcgtcggaagccacgacgagccgtgcttctccggcgacggtgacggcgactggatggacgacgtgagggccctggcgtcgtttctggagtccgacgaggactggctccgctgtcagacggccgggcagcttgcgtagtggccaggtaccactaactatctatactgtaataatgttgtatagccgccggatagctagctagtttagtcattcagcggcgatgggtaataataaagtgtcatccatccatcaccatgcgtggcaacgtgagcaatgacctgattgaacaaattgaaatgaaaagaagaaatatgttatatgtcaacgagatttcctcataatgccactgacgacgtgtgtccaagaaatgtatcagtgatacgtatattcacaatttttttatgacttatactcacaatttgtttttttactacttatactcacaatttgttgtgcgtaccataacaatttcgatcgaatatatatcagaaagttgacgaaagtaagctcactcaaaaagttaaatgggctgcggaagctgcgtcaggcccaagttttggctattctatccggtatccacgattttgatggctgagggacatatgttcgctttactagacaattcagtacattaaaaacgtccgcaatgtgttattaagttgtctaagcgtcaatttgtttacaccacaatatatcctgccaccagccagccaacagctccccgaccggcagctcggcaca

SEQ ID NO: 58 - DNA, 12047 bp, Artificial sequence
  Synthetic
gtttacccgccaatatatcctgtcaaacactgcggccgcacttgaccgcggatggagccggagctgtggtgaggccatcgacgggaggtgggggagaacacagtctcagtgttctttgtgagtccgcaaggtttttagcttttctgtattaattaaggttgctgttggctgtagaatacggtcgtggaagagctgtatcggtagctactacgtaagctattatatactggaagtctggagctcgtcgatctccggtcgtcttcctccatttctcctcgtcttgctttgactgctgctaccatttgcttctgttttctgatgaagcatgccatgtcggccaccagtgtttgtgtggtttttgcagggaatggctttcaagtgctgtgattgaatggccctcgtcgtcctcggctgagctcacatggacgcgtcatgtgagtgagatatatgatcatatgatgagtggggttcgggtgagtgcgtacttgaagtaggatcccgctttcactcattcattcattggcctttaaaccgggaaattttcgcgaggagatggagggaagcaagcagggtgacgagtgcagagtgccgcgagcgctttgtcaaaaggcaccgccgtaggcaaaaaaatcaatggccctgactgactcgatggtagtactactgtagagactagagagggttgctccccatatcttcgtgtgacttttactccagcattgcatttccgtcattgagacgttaattaatagcagctttcgggacagatgactgtggccatgtttcgtcacggccgcttcgtgccagctgggggtactatagtactgtgattttgttagtaaaaactttcattaggccaccattgacgaccgggccttcgcttttgctgcgctaattaaccatttcccggcgaccgaagggaacatgaacatgccccgacacatgagggcatgaggactagtgttctccctgtcgttcgttgacttgactagtgatagtttaaacgctcttcaactggaagagcggttactaccggtgctggatcggccagaatggccccggaccggagctttgagagtacaatgatgaacctagattaatcaatgccaaagtctgaaaaatgcaccctcagtctatgatccagaaaatcaagattgcttgaggccctgttcggttgttccggattagagccccggattaattcctagccggattacttctctaatttatatagattttgatgagctggaatgaatcctggcttattccggtacaaccgaacaggccctgaaggataccagtaatcgctgagctaaattggcatgctgtcagagtgtcagtattgcagcaaggtagtgagataaccggcatcatggtgccagtttgatggcaccattagggttagagatggtggccatgggcgcatgtcctggccaactttgtatgatatatggcagggtgaataggaaagtaaaattgtattgtaaaaagggatttcttctgtttgttagcgcatgtacaaggaatgcaagttttgagcgagggggcatcaaagatctggctgtgtttccagctgtttttgttagccccatcgaatccttgacataatgatcccgcttaaataagcaacctcgcttgtatagttccttgtgctctaacacacgatgatgataagtcgtaaaatagtggtgtccaaagaatttccaggcccagttgtaaaagctaaaatgctattcgaatttctactagcagtaagtcgtgtttagaaattatttttttatataccttttttccttctatgtacagtaggacacagtgtcagcgccgcgttgacggagaatatttgcaaaaaagtaaaagagaaagtcatagcggcgtatgtgccaaaaacttcgtcacagagagggccataagaaacatggcccacggcccaatacgaagcaccgcgacgaagcccaaacagcagtccgtaggtggagcaaagcgctgggtaatacgcaaacgttttgtcccaccttgactaatcacaagagtggagcgtaccttataaaccgagccgcaagcaccgaattgcataatgaggatcgaggatggttttagagctagaaatagcaagttaaaataaggctagtccgttatcaacttgaaaaagtggcaccgagtcggtgctttttttttgcggccgcgtctaaaaacggcccctaactaacgcttagttgcccgctagattagtcccccgttagtgcctagttagacacacgacgaactaggggctagaattcctgcaaattgggttagcaaaacaaatctagtctaggtgtgttttgcgatccgatccccacccagctttcttgtacaaagtggccgttaacggatcggccagaatggcccggaccgggttaccccggaatcggacctcgggacgtcgccaaagttagctaggtgtccttagcgtttcttaggttctaggcgttaggggtcaataggttagcctagaagtcccgcactaacagcctagcttaacagttccaagctaagccactagactagccctatccgactaacctagtctaagccgaacggggatctaatctaagctaggcacccattagactagttcactagcgcgaccgcactaaactaggctaaaggttaatagcaactagttagctaggggacgttagctgcccaagcttgcataatgaggatcgaggatgaggagcatgcacggatagatggcgtctagcatatcgataggacatgacaagtggtacgatccccgtcacatgtccatggaggcatctgatatggacacggcgtgtatctatcgcggctggaacagaaccagcgctcgcgcggcggtcggcgggagggacagaccttggctccgtgcgttcaggttgtgcttgtgccgcgcgccacgcacggtctccgccgcctgcagctgaaattttagatttacatcctatccctttattttttttatttgtcacaattcagttcaaaaatgaagaacggaggtagtgcatcctttgtgagactaatgaaaatcacatctggatcctgaaatcggcgtcgtaacctacaaggccacggactggattagatagtggtccatggtgcataatgaggatcgaggggtaccagtctaattacaaaactaattgcacaaccgctaagctgaatcgcgagatggatctattaaccttaattagtccatgatttgacaatgtggtgctacaataaccatttgctaatgatggattacttaggtttaatagattcgtctcgtgatttagcctatgggttctgctattaattttgtaattagctcatatttagttcttataattagtatccgaacatccaatgtgacatgctaaagtttaaccctggtatccaaatgaagtcttatgagagtttcatcactccggtggtatatgtacttaggctccgttttcttccaccgacttatttttagcacccgtcacattgaatgtttagatactaattagaagtattaaacgtagactatttacaaaatccattacataagacgaatctaaacggcgagacgaatctattaaacctaattagtccatgatttgacaatgtgttgctacagtaaacatttgctaatgatggattaattaggcttaatagattcgtctcgccgtttagcctccacttatgtaatgggttttctaaacaatctacgtttaatactcctaattagtatctaaatattcaatgtgacacgtgctaaaaataagtcagtggaaggaagagaacgtccccttagttttccatcttattaattgtacgatgaaactgtgcagccagatgattgacaatcgcaatacttcaactagtgggccatgcacatcagcgacgtgtaacgtcgtgagttgctgttcccgtagagaaatatcaactggtgggccacgcacatcagcgtcgtgtaacgtggacggaggagccccgtgacggcgtcgacatcgaacggccaccaaccacggaaccacccgtccccacctctcggaagctccgctccacggcgtcgacatctaacggctaccagcaggcgtacgggttggagtggactccttgcctctttgcgctggcggcttccggaaattgcgtggcggagacgaggcgggctcgtctcacacggcacggaagacgtcacgggttccttccccacctctcctcttccccaccgccataaatagccgaccccctcgcctttctccccaatctcatctcgtctcgtgttgttcggagcacaccacccgccccaaatcgttcttcccgcaagcctcggcgatccttcacccgcttcaaggtacggcgatcgtcttcctcctctagatcggcgtgatctgcaagtagttgatttggtagatggttaggatctgtgcactgaagaaatcatgttagatccgcgatgtttctgttcgtagatggctgggaggtggaatttttgtgtagatctgatatgttctcctgtttatcttgtcacgctcctgcgatttgtggggattttaggtcgttgatctgggaatcgtggggttgcttctaggctgttcgtagatgaggtcgttctcacggtttactggatcattgcctagtagatcagctcgggctttcgtctttgtatatggtgcccatacttgcatctatgatctggttccgtggtgttacctaggtttctgcgcctgattcgtccgatcgattttgttagcatgtggtaaacgtttggtcatggtctgatttagattagagtcgaataggatgatctcgatctagctcttgggattaatatgcatgtgtcaccaatctgttccgtggttaagatgatgaatctatgcttagttaatgggtgtagatatatatgctgctgttcctcaatgatgccgtagcttttacctgagcagcatggttcctcctgttacttaggtagatgcacatgcttatagatcaagatatgtactgctactgttggaattgtttagtatacctgatgatcatccatgctcttgttacttgttttggtatacttggatgatggcatgctgctgctttttgttgatttgagcccatccatatctgcatatgtcacatgattaagatgattacgctgtttctgtatgatgccatagcttttatgtgagcaacatgcatcctcctggttatatgcattaatagatggaagatatctattgctacaatttgatgattattttgtacatacgatgatcaagcatgctcttcatactttgttgatatacttggataatgaaatgctgctgcacgttcattctatagcactaatgatgtgatgaacacgcacgacctgtttgtggcatctgtttgaatgtgttgttgctgttcactagagactgttttattaacctactgctagatacttacccttctgtctgtttattcttttgcaggtcgaccgccggggatccatggttgaacaagatggattgcacgcaggttctccggccgcttgggtggagaggctattcggctatgactgggcacaacagacaatcggctgctctgatgccgccgtgttccggctgtcagcgcaggggcgcccggttctttttgtcaagaccgacctgtccggtgccctgaatgaactgcaggacgaggcagcgcggctatcgtggctggccacgacgggcgttccttgcgcagctgtgctcgacgttgtcactgaagcgggaagggactggctgctattgggcgaagtgccggggcaggatctcctgtcatctcaccttgctcctgccgagaaagtatccatcatggctgatgcaatgcggcggctgcatacgcttgatccggctacctgcccattcgaccaccaagcgaaacatcgcatcgagcgagcacgtactcggatggaagccggtcttgtcgatcaggatgatctggacgaagagcatcaggggctcgcgccagccgaactgttcgccaggctcaaggcgcgcatgcccgacggcgatgatctcgtcgtgacccatggcgatgcctgcttgccgaatatcatggtggaaaatggccgcttttctggattcatcgactgtggccggctgggtgtggcggaccgctatcaggacatagcgttggctacccgtgatattgctgaagagcttggcggcgaatgggctgaccgcttcctcgtgctttacggtatcgccgctcccgattcgcagcgcatcgccttctatcgccttcttgacgagttcttctgagcccatcggtcatggatgcttctactgtacctgggtcgtctggtctctgcctgtgtcacctttgaagtacctgtgtcgggattgtgtttggtctagaactgcagtttgtctttgatgttcttttgtctggtcttatgaactggttgtatctgtatgtttactgtaaactgttgttgcggtgcagcagtatggcatccgaatgaataaatgatgtttggacttaaatctgtactctgtttgttttcggttatgccagttctatattgcctgagatcagaatgtttagcttttgagttctgtttggcttgtggtcgactcctgtttcttacttgaggcgtaactctgttctggcaaactcaaatgtctaactgaatgttttaggacttaattgttggacagattaacgtgtttggtttgtttctagattgtgattcggaaggcttgttagttgtggaatcaaggagagcagctaggtctgtgcagaacgttattttggatttaagccttctcagattatgccattactctaaacctaatgatatcatatttcactcggggatgttggagtagtcttttctttctcctgcagacaaaatgattttgctttcgtgtgtgtacatgattttgtgcaactgttgcaacaactgaagtagacaagttttgacctcaccagaagaatgaaaaagattttggaatttgttacatcgacaaaccattgtaacttggcccatcagaatgcacagagaagcggctacaaattgacatgcgttgcaaactttgcaatagttgatgcacatgtttgccattgcctgccagtcttaggaaaagtgtgtggttcgagaaatctaagcatatgtgctctgctcacattgcgtggaacccacacagctttgtcacactcttgtccactccagaagtcattcctggcgctgtttacccctggtaaagagtaaccgaaaacttctcaaggctgtacccaaaactggaaggaaatttggaggcggccgcatgaggagcaatcattgttcaagacatgatgcaaagctagaaaactttgattgtggccgtccttgtgaagtttaggccggggggaacttcatgaaccctatcgaagcttaattagttcttttttgttgttagccatgtttgtattgtagttaaggtgaacaacatgacgccgcacccgcgatctcagggctcgtccccacacaggagggcacgtcgtcgtcttcgccgccgagcatcagagattcagagcacatacacgcacatctcaagcaaacggagtagtacgtcctactcctacgtacatacctagccgacgacctttatgtgcacaccaccactgctctgctgcccggcctctccgtcgtccgttcatcaccagcataatgaggatcgaggatgaggggcgcgccgacgtcccgaggtccgattccgggctaattaacacctagctcgccactcgactaattagggactaagcctagcgcttagccgttaaaacctagcacaccctaagcacccttagttaggttcccctcttaattaagccctagtgagcccctaagttaaggggacgctaagagccccctaacctagtattcggctagaggcgaactaggctaaacacctaagcgcacctctttaagctagatcgctagggggctaggctagagcttcgctagattagtctaagggcagcctgcagggccctcttgtcggaccagttgcccaccacgttggtgaggggcaactttattatacaaagttgatagataaatcagatatcgaccctagtcacttactgcccttaaggccaattgttcaagattcattcaacaattgaaacatctcccatgattaaatcagtataaggttgctatggtcttgcttgacaaagtttttttttgagggaatttcaactaaatttttgagtgaaactatcaaatactgattttaaaaaatttttataaaaggaagcgcagagataaaaggccatctatgctacaaaagtacccaaaaatgtaatcctaaagtatgaattgcattttttttttgtttggacgaaaggaaaggagtattaccacaagaatgatatcatcttcatatttagatcttttttgggtaaagcttgagattctctaaatatagagaaatcagaagaaaaaaaaaccgtgttttggtggttttgatttctagcctccacaataactttgacggcgtcgacaagtctaacggacaccaagcagcgaaccaccagcgccgagccaagcgaagcagacggccgagacgttgacaccttcggcgcggcatctctcgagagttccgctccggcgctccacctccaccgctggcggtttcttattccgttccgttccgcctcctgctctgctcctctccacaccacacggcacgaaaccgttacggcaccggcagcacccagcacgggagaggggattcctttcccaccgttccttccctttccgccccgccgctataaatagccagccccatccccagcttttttccccaatctcatctcctctctcctgttgttcggagcacacgcacaatccgatcgatccccaaatccccttcgtctctcctcgcgagcctcgtggatcccagcttcaaggtacggcgatcgatcatcccccctccttctctctaccttcttttctctagactacatcggatggcgatccatggttagggcctgctagtttcccttcctgttttgtcgatggctgcgaggcacaatagatctgatggcgttatgacggctaacttgtcatgttgttgcgatttatagtccctttaggagatcagtttaatttctcggatggttcgagatcggtggtccatggttagtaccctaagatccgcgctgttagggttcgtagatggaggcgacctgttctgattgttaacttgtcagtacctgggaaatcctgggatggttctagctcgtccgcagatgagatcgatttcatgatcctctgtatcttgtttcgttgcctaggttccgtctaatctatccgtggtatgatgtagatgttttgatcgtgctaactacgtcttgtaaagttaattgtcaggtcataatttttagcatgcctttttttttgtttggttttgtctaattgggctgtcgttctagatcagagtagaagactgttccaaactacctgctggatttattgaacttggatctgtatgtgtgtcacatatcttcataaattcatgattaagatggattgaaatatcttttatctttttggtatggatagttctatatgttggtgtggctttgttagatgtatacatgcttagatacatgaagcaacgtgctgctactgtttagtaattgctgttcatttgtctaataaacagataaggatatgtatttatgttgctgttggttttgctggtactttgttggatacaaatgcttcaatacagaaaacagcatgctgctacgatttaccatttatctaatcttatcatatgtctaatctaataaacaaacatgcttttaaattatcttcatatgcttggatgatggcatacacagcggctatgtgtggttttttaaatacccagcatcatgggcatgcatgacactgctttaatatgctttttatttgcttgagactgtttcttttgtttatactgaccctttagttcggtgactcttctgcaggtcgactttaacttagcctaggatccatggcccagtccaagcacggcctgaccaaggagatgaccatgaagtaccgcatggagggctgcgtggacggccacaagttcgtgatcaccggcgagggcatcggctaccccttcaagggcaagcaggccatcaacctgtgcgtggtggagggcggccccttgcccttcgccgaggacatcttgtccgccgccttcatgtacggcaaccgcgtgttcaccgagtacccccaggacatcgtcgactacttcaagaactcctgccccgccggctacacctgggaccgctccttcctgttcgaggacggcgccgtgtgcatctgcaacgccgacatcaccgtgagcgtggaggagaactgcatgtaccacgagtccaagttctacggcgtgaacttccccgccgacggccccgtgatgaagaagatgaccgacaactgggagccctcctgcgagaagatcatccccgtgcccaagcagggcatcttgaagggcgacgtgagcatgtacctgctgctgaaggacggtggccgcttgcgctgccagttcgacaccgtgtacaaggccaagtccgtgccccgcaagatgcccgactggcacttcatccagcacaagctgacccgcgaggaccgcagcgacgccaagaaccagaagtggcacctgaccgagcacgccatcgcctccggctccgccttgccctccggactcagatctcgatagggtaccaatggccagttaacagatccagctgctgctgttctagggttcacaagtctgcctatttgtcttccccaatggagctatggttgtctggtctggtccttggtcgtgtcccgtttcattgtgtactatttacctgtaatgtgtatccttaagtctggtttgatggtgtctgaaacgttttgctgtggtagagcagcatggaagaactataatgaataagtgatccctaatcattgtgtccaaattttgcttctgctatacccttttgtgctgtttcttatgttttgcttaaaaatttgatctgacaaacaaatttgtctaaattatgctcttgttctgactgtgtactgtacacatttgtattgctaccggtttggcacatagttttctctttgattgcagatcaaacccttctgattgcagattgcttggctatggctgatgtgctcactgttcttctttagcttgtatattgctgatggtggcttggctacggctgaaaaagttgctgctgcgccgacttggcaactgttgctccagtaatgctttgtcctctcttcctagccgccgacttggcacttggcagctgttgctcctgtaatgcgttgttatctcttatctcttgagatgtactatgattttgaggctgtttgacttgtgccagattgccagtgctgatgctatattatctcaggtttttatgctagtatatgttttactgtgtgctgcctgtgtcgagttacgtaatctattgaaccgctatgcgtgttgatgccctgttgttgcttgccagattgatgcccctgttgcttgcagcttgcaagctgtagtgaaatcctaaaattcgaaaccaaatctattctgaacttttgaagatctgtgatgtccggaagaaaagattcaaacagataaacgggactctccagaatctataaaataaatgatcgacaaacgctttgctttggtaggcttcctagttagttagcggaccgaagcttcggttgtttctgtggccgaattcaatcactagagtcgacctgcatgattccgatgacttcgtaggttcctagctcaagccgctcgtgtccaagcgtcacttacgattagctaatgattacggcatctaggaccgactagctagctagctaagagctcggtaccgagctcgaattcattccgattaatcgtggcctcttgctcttcaggatgaagagctatgtttaaacgtgcaagcgctactagacaattcagtacattaaaaacgtccgcaatgtgttattaagttgtctaagcgtcaatttgtttacaccacaatatatcctgcca

SEQ ID NO: 59 - DNA, 72 bp, Artificial sequence
  Synthetic
atgggcgagagcgtcaaggcaataaaattaaagatcctcgacatgttcctcgaccccgagtgcaccaagcag

SEQ ID NO: 60 - DNA, 1419 bp, Artificial sequence
  Synthetic
gacgacaactggcgcaaggacctcagcaccatgagccgcttctgcggcgaggccggcaacatgtgcctcagggacctctacaactacttcagcatgcccaaggaggaccgcatcagctccaaggacttatataacgccatgtaccataaaactaagctcctccaccccggcctccccgggaaggtggctaaccaaatcgtcaaccacgccaaggacgtctggaagcgcaacgccaagctcatctaccgcaaccaaatcagcatgcccacatataagatcaccaccgcccccatccgcctccaaaataacatctacaaattaataaaaaataagaacaaatacataatcgacgtccagctctacagcaaggagtacagcaaggacagcggcaagggcacccacaggtacttcctcgtcgccgtcagggacagcagcaccaggatgatcttcgacaggatcatgagcaaggaccacatcgacagcagcaagagctacacccagggccagctccaaatcaagaaggaccaccagggcaagtggtactgcatcatcccctatacattccccacccacgaaaccgtcctcgaccccgacaaggtcatgggcgtcgacctcggggtggctaaggccgtctactgggctttcaacagcagctataaaagaggctgcatcgacggcggcgagatcgagcacttcaggaagatgatcagggcccggcgcgtcagcatccagaatcaaatcaaacacagcggcgacgcccgcaagggccacggcaggaagagggccctcaagcccatcgaaaccctcagcgagaaggagaagaacttccgcgacacaataaaccacaggtacgccaacaggatcgtcgaggccgctatcaagcagggctgcggcaccatccagatcgagaacctcgagggcatcgctgacaggaccggcagcaagttcctcaagaactggccctactacgacctccagaccaagatcgtcaataaagccaaggagcacggcatcaccgtcgtcgcaataaacccccagtatacatcccagcgctgcagcatgtgcggctacatcgagaaaaccaacaggagcagccaggccgtgttcgagtgcaagcagtgcggctacggcagccgcaccatctgcatcaactgcaggcacgtccaagtctccggcgacgtctgcgaggagtgcggcggcatcgtcaagaaggagaacgtcaacgccgactacaacgccgccaagaacatcagcaccccctacatcgaccagataataatggagaagtgcctcgagctcggcatcccctaccgctccatcacctgcaaggagtgcggccacatccaggctagcggcaacacctgcgaggtctgcggcagcaccaacatcctcaaaccaaagaagatccgcaaggcaaaa

SEQ ID NO: 61 - protein, 497 aa, Artificial sequence
  Synthetic
MGESVKAIKLKILDMFLDPECTKQDDNWRKDLSTMSRFCGEAGNMCLRDLYNYFSMPKEDRISSKDLYNAMYHKTKLLHPGLPGKVANQIVNHAKDVWKRNAKLIYRNQISMPTYKITTAPIRLQNNIYKLIKNKNKYIIDVQLYSKEYSKDSGKGTHRYFLVAVRDSSTRMIFDRIMSKDHIDSSKSYTQGQLQIKKDHQGKWYCIIPYTFPTHETVLDPDKVMGVDLGVAKAVYWAFNSSYKRGCIDGGEIEHFRKMIRARRVSIQNQIKHSGDARKGHGRKRALKPIETLSEKEKNFRDTINHRYANRIVEAAIKQGCGTIQIENLEGIADRTGSKFLKNWPYYDLQTKIVNKAKEHGITVVAINPQYTSQRCSMCGYIEKTNRSSQAVFECKQCGYGSRTICINCRHVQVSGDVCEECGGIVKKENVNADYNAAKNISTPYIDQIIMEKCLELGIPYRSITCKECGHIQASGNTCEVCGSTNILKPKKIRKAK

SEQ ID NO: 62 - DNA, 4344 bp, Zea mays
acgacgacggggtgacaaggaccggcggcgagggttagggtttgagagcagtccagtgcggaaggacgaacgggcgtggggggagctaggtatgaaccgaatagggtgggccatgagacggcggacggcggaggatctcctctgcaaagatgcacggtgggatgggcaggaccttacctcacgcggcggacggatgttgccgacgcctgctcctttctccctgcagcggaccgacgtcgcgcgcgacaggtgacgaggaacgacggtgagggcgtgaggcgggggcacccgaggactggtgggggcgtatgggtgctggtcagtgcctgatccagacttctcactgcatcgtcacggtcttcctccccatgcctcgaaagcatcgcggcgcgcgcgcggcgagggaggagctcggcggcgccttggttcaggcgagacaggggcgggggctatgtgcctgtgggggaggggaacccgtggtggggcatcaggaggcgggtgtagtgggcgggggcatggaggtaggagagcgcgacaggggcacggacgccgaaccgggggatggggcacatattgcgcgggggagggcgagattgccgcaggggacggcgggattgccgcgggggagggagattgtcgcggtgacgccgagattgccgctggggcgagcgccgagattgccgggggagggcgaggcgggtgggatgcggggtgccccacggcagaaccgtgcaccactgtcgggctgtgaacgtctacaatacttacttatgtagtagtagatatatatatatatatatatataatgtaaaacaatattttaattataatgtaaacagtgttttacatgattatatacaagatcgactagatagagtttaaggccatatctagcggaacaggtatataagcgtgcaaaacaatgttttgttttgtacgctacactgtttttagagtggagttaactaaaaccttaacttttttttgcaaataaatctctaaataatgtcgtactgtatacactcgagatttccatcgcacaagacacgaaaaaatcccgatcaatttaacgaacattgttttgcattatagattatattgtttacagaatgaagttaactaaaaccttaaccttttgcagataaatctctaaatagtgccgtactgtatacactcgagatttccaccgcacaagacatgagaaaattccggtcgatttgacaaagactgggtgttattaattagaggaagcagatccagccacatgttgtctcacatctgatcccccacgtatagtcgtatacgtttggcccaaacctagctcgatccatgtatgaaacacgtctcgtctcgccttctacctcctttttctatcacaggagattaaagtgagagagagagggcgctcaatgaactgcggcattgaacaatggagctgcaagagcaatgatgcactagctagtgtaatgcagtgcatgcatggtagattggtagcttgcctttgcagtttgcaccaggcaccagcagcagctagaagacgacagacgacaggggtttggctgctaggttgcggaagggcagttaccagttgccacaaggggagcctggccctctgcatcctcctcatgatagctctgtctctctctctcacagacacacacacagagactcttccaaattccgaagcggccaatgcaatgcaagagccagcccccggccgtgtgtcaacttcacttgtctctctccaaaagatatcgtatcacccatggccatgacccccctcccccagccccaacctatatcacctagcgcagctacgctctcttctcccgctctcgctctctgcatgctagctaccttctagctatctagcctctaggtccaatgcactccctccttataaacaaggaaccctccttcgcctctcttgccatagaccggacaccggagaggtcactgcacaggagcgctcaggaaggccgctgcgctgagatagaggcatggcggccaatgcgggcggcggtggagcgggaggaggcagcggcagcggcagcgtggctgcgccggcggtgtgccgccccagcggctcgcggtggacgccgacgccggagcagatcaggatgctgaaggagctctactacggctgcggcatccggtcgcccagctcggagcagatccagcgcatcaccgccatgctgcggcagcacggcaagatcgagggcaagaacgtcttctactggttccagaaccacaaggcccgcgagcgccagaagcgccgcctcaccagcctcgacgtcaacgtgcccgccgccggcgcggccgacgccaccaccagccaactcggcgtcctctcgctgtcgtcgccgccttcaggtatgtgcgtcagtgcgtgtggtgtgggtagtatatatatatatatatatatatatatatatatatatatatatatatatatatatatatatatggcctctctttgcattggcacgccaatcggccatcgagatccaatcatatatatcatccaaacgtatagtattagtacatctgtacatgtgactgcaaactgacgtgcacgcgtgtgcaccgtcgtcatcactgatcaggcgcggcgcctccctcgcccaccctcggcttctacgccgccggcaatggcggcggatcggctgggctgctggacacgagttccgactggggcagcagcggcgctgccatggccaccgagacatgcttcctgcaggtgctgtagtacgttcttttcttggggattgcgcgcagtttcacgtacgtacgtacgttcgagtcgatcgccgcgtcgttccatccaccggccggtatatataactgttgggtacggcggtgcgcgcccgcaggactacatgggcgtgacggacacgggcagctcgtcgcagtggccatgcttctcgtcgtcggacacgataatggcggcggcggcggccgcggcgcgggtggcgacgacgcgggcgcccgagacactccctctcttcccgacctgcggcgacgacgacgacgacgacagccagcccccgccgcggccgcggcacgcagtcccagtcccggcaggcgagaccatccgcggcggcggcggcagcagcagcagctacttgccgttctggggtgccggtgccgcgtccacaactgccggcgccacttcttccgttgcgatccagcagcaacaccagctgcaggagcagtacagcttttacagcaacagcacccagctggccggcaccggcagccaagacgtatcggcttcagcggccgccctggagctgagcctcagctcatggtgctccccttaccctgctgcagggagcatgtgagagcaacgcgagctaccactgggacgtgcgttgctgtcattgtcctaggttagtagctagtgccagttactagtaagcatcaggcataggagtatgtagtagaagcatgtctggagaaaggcaatagctagcgtttgggagatctctggcggtactattattagatagcgaatttgcatactatgcagcatgcatgttgccggccgggcgggctttagactccagctactgcatgcgtgcatgcggtggtcctcatgtatgtcggcatgtgtgcgtgtgtgtgtggcagcagcagcagcagtgaattctagtgcagtggtggtggttgtaacgtgtagtttgggggcaggggcacagttgtgtcgaacttgtgcggttgtcccttccttttgtgacttccagaaaagggaatgaggcctgcctgcgtgtctgcttttccatgctcacctcgcctgttgtctgttgagacttcactcagccctgttggtgccttgtagttccagttccagagcatatgcaggtgcaggaatggcatctctaccactgctttcgacttgttggcttgttttcttctatgatactagtgtacttggattgaatgatcacattttttgctggcctcgtatctttgaaatgatcatgttaatttggttacacataagacgataagggtaggtagttcaatgctattagaaaactaggtatttttagttatattttaatccaggaaaaaatatataaaaactaatcgtgatatatagaaatacgcatatgcaaacttagtataataattatgaatacaatagatagtaacctgattgtatatacttttaagggaaaatagatatggcaatgggcctcgatcttcgattctctgcggagaattcttccattaaaggatagggatgaggaaacttcgtccccccacggagatgtaaacgagaaaattttctaccccgatgggtaaaaccagagatggggtgaggaaacatttcccata

SEQ ID NO: 63 - DNA, 24 bp, Artificial sequence
  Synthetic
gttccttgtttataaggagggagt

SEQ ID NO: 64 - DNA, 24 bp, Artificial sequence
  Synthetic
attccgaagcggccaatgcaatgc

SEQ ID NO: 65 - DNA, 24 bp, Artificial sequence
  Synthetic
gttcattgagcgccctctctctct

SEQ ID NO: 66 - DNA, 24 bp, Artificial sequence
  Synthetic
gttcaatgccgcagttcattgagc

SEQ ID NO: 67 - DNA, 24 bp, Artificial sequence
  Synthetic
attccggtcgatttgacaaagact

SEQ ID NO: 68 - DNA, 24 bp, Artificial sequence
  Synthetic
attctgtaaacaatataatctata

SEQ ID NO: 69 - DNA, 15596 bp, Artificial sequence
  Synthetic
gtttacccgccaatatatcctgtcaaacactgcggccgcacttgaggccgagctcggtacggccagaatggcccggaccgggttaccaagcggccgcggtcacccggtccgggcctagaaggccaggtgcagcgtgacccggtcgtgcccctctctagagataatgagcattgcatgtctaagttataaaaaattaccacatattttttttgtcacacttgtttgaagtgcagtttatctatctttatacatatatttaaactttactctacgaataatataatctatagtactacaataatatcagtgttttagagaatcatataaatgaacagttagacatggtctaaaggacaattgagtattttgacaacaggactctacagttttatctttttagtgtgcatgtgttctcctttttttttgcaaatagcttcacctatataatacttcatccattttattagtacatccatttagggtttagggttaatggtttttatagactaatttttttagtacatctattttattctattttagcctctaaattaagaaaactaaaactctattttagtttttttatttaataatttagatataaaatagaataaaataaagtgactaaaaattaaacaaataccctttaagaaattaaaaaaactaaggaaacatttttcttgtttcgagtagataatgccagcctgttaaacgccgtcgacgagtctaacggacaccaaccagcgaaccagcagcgtcgcgtcgggccaagcgaagcagacggcacggcatctctgtcgctgcctctggacccctctcgagagttccgctccaccgttggacttgctccgctgtcggcatccagaaattgcgtggcggagcggcagacgtgagccggcacggcaggcggcctcctcctcctctcacggcaccggcagctacgggggattcctttcccaccgctccttcgctttcccttcctcgcccgccgtaataaatagacaccccctccacaccctctttccccaacctcgtgttgttcggagcgcacacacacacaaccagatctcccccaaatccacccgtcggcacctccgcttcaaggtacgccgctcgtcctcccccccccccctctctaccttctctagatcggcgttccggtccatgcatggttagggcccggtagttctacttctgttcatgtttgtgttagatccgtgtttgtgttagatccgtgctgctagcgttcgtacacggatgcgacctgtacgtcagacacgttctgattgctaacttgccagtgtttctctttggggaatcctgggatggctctagccgttccgcagacgggatcgatttcatgattttttttgtttcgttgcatagggtttggtttgcccttttcctttatttcaatatatgccgtgcacttgtttgtcgggtcatcttttcatgcttttttttgtcttggttgtgatgatgtggtctggttgggcggtcgttctagatcggagtagaattctgtttcaaactacctggtggatttattaattttggatctgtatgtgtgtgccatacatattcatagttacgaattgaagatgatggatggaaatatcgatctaggataggtatacatgttgatgcgggttttactgatgcatatacagagatgctttttgttcgcttggttgtgatgatgtggtgtggttgggcggtcgttcattcgttctagatcggagtagaatactgtttcaaactacctggtgtatttattaattttggaactgtatgtgtgtgtcatacatcttcatagttacgagtttaagatggatggaaatatcgatctaggataggtatacatgttgatgtgggttttactgatgcatatacatgatggcatatgcagcatctattcatatgctctaaccttgagtacctatctattataataaacaagtatgttttataattattttgatcttgatatacttggatgatggcatatgcagcagctatatgtggatttttttagccctgccttcatacgctatttatttgcttggtactgtttcttttgtcgatgctcaccctgttgtttggtgttacttctgcaggtcgactctagaggatccatgggcgagagcgtcaaggcaataaaattaaagatcctcgacatgttcctcgaccccgagtgcaccaagcaggtaagtttctgcttctacctttgatatatatataataattatcattaattagtagtaatataatatttcaaatatttttttcaaaataaaagaatgtagtatatagcaattgcttttctgtagtttataagtgtgtatattttaatttataacttttctaatatatgaccaaaacatggtgatgtgcaggacgacaactggcgcaaggacctcagcaccatgagccgcttctgcggcgaggccggcaacatgtgcctcagggacctctacaactacttcagcatgcccaaggaggaccgcatcagctccaaggacttatataacgccatgtaccataaaactaagctcctccaccccggcctccccgggaaggtgaagaaccaaatcgtcaaccacgccaaggacgtctggaagcgcaacgccaagctcatctaccgcaaccaaatcagcatgcccacatataagatcaccaccgcccccatccgcctccaaaataacatctacaaattaataaaaaataagaacaaatacataatcgacgtccagctctacagcaaggagtacagcaaggacagcggcaagggcacccacaggtacttcctcgtcgccgtcagggacagcagcaccaggatgatcttcgacaggatcatgagcaaggaccacatcgacagcagcaagagctacacccagggccagctccaaatcaagaaggaccaccagggcaagtggtactgcatcatcccctatacattccccacccacgaaaccgtcctcgaccccgacaaggtcatgggcgtcgccctcggggtggctaaggccgtctactgggctttcaacagcagctataaaagaggctgcatcgacggcggcgagatcgagcacttcaggaagatgatcagggcccggcgcgtcagcatccagaatcaaatcaaacacagcggcgacgcccgcaagggccacggcaggaagagggccctcaagcccatcgaaaccctcagcgagaaggagaagaacttccgcgacacaataaaccacaggtacgccaacaggatcgtcgaggccgctatcaagcagggctgcggcaccatccagatcgagaacctcgagggcatcgctgacaggaccggcagcaagttcctcaagaactggccctactacgacctccagaccaagatcgtcaataaagccaaggagcacggcatcaccgtcgtcgcaataaacccccagtatacatcccagcgctgcagcatgtgcggctacatcgagaaaaccaacaggagcagccaggccgtgttcgagtgcaagcagtgcggctacggcagccgcaccatctgcatcaactgcaggcacgtccaagtctccggcgacgtctgcgaggagtgcggcggcatcgtcaagaaggagaacgtcaacgccgactacaacgccgccaagaacatcagcaccccctacatcgaccagataataatggagaagtgcctcgagctcggcatcccctaccgctccatcacctgcaaggagtgcggccacatccaggctagcggcaacacctgcgaggtctgcggcagcaccaacatcctcaaaccaaagaagatccgcaaggcaaaaagcagggccgacccgaagaagaagcgcaaggtgggcagggctacgtgcgccaaggacatccaaaaagcagccgcggaggcggcactcgcctttcaggacgagacctgcgacaccaccaccaccaaccacggcctcgacatggaggagaccatggtcgaagccatctacacccccgagcagagcgagggcgccttctacatggacgaagagacaatgttcggcatgccaaccctcctcgacaacatggccgaaggcatgctgctgccgcccccgagcgtccagtggaaccacaactacgacggcgaaggcgacggggatgtgtccctgtggagctactaggtaccgtcatgggtcgtttaagctgccgatgtgcctgcgtcgtctggtgccctctctccatatggaggttgtcaaagtatctgctgttcgtgtcatgagtcgtgtcagtgttggtttaataatggaccggttgtgttgtgtgtgcgtactacccagaactatgacaaatcatgaataagtttgatgtttgaaattaaagcctgtgctcattatgttctgtctttcagttgtctcctaatatttgcctgcaggtactggctatctaccgtttcttacttaggaggtgtttgaatgcactaaaactaatagttagtggctaaaattagttaaaacatccaaacaccatagctaatagttgaactattagctatttttggaaaattagttaatagtgaggtagttatttgttagctagctaattcaactaacaatttttagccaactaacaattagtttcagtgcattcaaacacccccttaatgttaacgtggttctatctaccgtctcctaatatatggttgattgttcggtttgttgctatgctattgggttctgattgctgctagttcttgctgaatccagaagttctcgtagtatagctcagattcatattatttatttgagtgataagtgatccaggttattactatgttagctaggttttttttacaaggataaattatctgtgatcataattcttatgaaagctttatgtttcctggaggcagtggcatgcaatgcatgacagcaacttgatcacaccagctgaggtagatacggtaacaaggttcttaaatctgttcaccaaatcattggagaacacacatacacattcttgccagtcttggttagagaaatttcatgacaaaatgccaaagctgtcttgactcttcacttttggccatgagtcgtgacttaacggcaaacgctaattagtcactaggcccaggaaacactaactaagccctagcttatcctagcgcaacctagttaggtcttccacgattttgagagtacaatgatgaacctagattaatcaatgccaaagtctgaaaaatgcaccctcagtctatgatccagaaaatcaagattgcttgaggccctgttcggttgttccggattagagccccggattaattcctagccggattacttctctaatttatatagattttgatgagctggaatgaatcctggcttattccggtacaaccgaacaggccctgaaggataccagtaatcgctgagctaaattggcatgctgtcagagtgtcagtattgcagcaaggtagtgagataaccggcatcatggtgccagtttgatggcaccattagggttagagatggtggccatgggcgcatgtcctggccaactttgtatgatatatggcagggtgaataggaaagtaaaattgtattgtaaaaagggatttcttctgtttgttagcgcatgtacaaggaatgcaagttttgagcgagggggcatcaaagatctggctgtgtttccagctgtttttgttagccccatcgaatccttgacataatgatcccgcttaaataagcaacctcgcttgtatagttccttgtgctctaacacacgatgatgataagtcgtaaaatagtggtgtccaaagaatttccaggcccagttgtaaaagctaaaatgctattcgaatttctactagcagtaagtcgtgtttagaaattatttttttatataccttttttccttctatgtacagtaggacacagtgtcagcgccgcgttgacggagaatatttgcaaaaaagtaaaagagaaagtcatagcggcgtatgtgccaaaaacttcgtcacagagagggccataagaaacatggcccacggcccaatacgaagcaccgcgacgaagcccaaacagcagtccgtaggtggagcaaagcgctgggtaatacgcaaacgttttgtcccaccttgactaatcacaagagtggagcgtaccttataaaccgagccgcaagcaccgaattgttccttgtttataaggagggagtgttttagagctagaaatagcaagttaaaataaggctagtccgttatcaacttgaaaaagtggcaccgagtcggtgcttttttttttgatggctgagtgagagtacaatgatgaacctagattaatcaatgccaaagtctgaaaaatgcaccctcagtctatgatccagaaaatcaagattgcttgaggccctgttcggttgttccggattagagccccggattaattcctagccggattacttctctaatttatatagattttgatgagctggaatgaatcctggcttattccggtacaaccgaacaggccctgaaggataccagtaatcgctgagctaaattggcatgctgtcagagtgtcagtattgcagcaaggtagtgagataaccggcatcatggtgccagtttgatggcaccattagggttagagatggtggccatgggcgcatgtcctggccaactttgtatgatatatggcagggtgaataggaaagtaaaattgtattgtaaaaagggatttcttctgtttgttagcgcatgtacaaggaatgcaagttttgagcgagggggcatcaaagatctggctgtgtttccagctgtttttgttagccccatcgaatccttgacataatgatcccgcttaaataagcaacctcgcttgtatagttccttgtgctctaacacacgatgatgataagtcgtaaaatagtggtgtccaaagaatttccaggcccagttgtaaaagctaaaatgctattcgaatttctactagcagtaagtcgtgtttagaaattatttttttatataccttttttccttctatgtacagtaggacacagtgtcagcgccgcgttgacggagaatatttgcaaaaaagtaaaagagaaagtcatagcggcgtatgtgccaaaaacttcgtcacagagagggccataagaaacatggcccacggcccaatacgaagcaccgcgacgaagcccaaacagcagtccgtaggtggagcaaagcgctgggtaatacgcaaacgttttgtcccaccttgactaatcacaagagtggagcgtaccttataaaccgagccgcaagcaccgaattattccgaagcggccaatgcaatgcgttttagagctagaaatagcaagttaaaataaggctagtccgttatcaacttgaaaaagtggcaccgagtcggtgctttttttttgtgagagtacaatgatgaacctagattaatcaatgccaaagtctgaaaaatgcaccctcagtctatgatccagaaaatcaagattgcttgaggccctgttcggttgttccggattagagccccggattaattcctagccggattacttctctaatttatatagattttgatgagctggaatgaatcctggcttattccggtacaaccgaacaggccctgaaggataccagtaatcgctgagctaaattggcatgctgtcagagtgtcagtattgcagcaaggtagtgagataaccggcatcatggtgccagtttgatggcaccattagggttagagatggtggccatgggcgcatgtcctggccaactttgtatgatatatggcagggtgaataggaaagtaaaattgtattgtaaaaagggatttcttctgtttgttagcgcatgtacaaggaatgcaagttttgagcgagggggcatcaaagatctggctgtgtttccagctgtttttgttagccccatcgaatccttgacataatgatcccgcttaaataagcaacctcgcttgtatagttccttgtgctctaacacacgatgatgataagtcgtaaaatagtggtgtccaaagaatttccaggcccagttgtaaaagctaaaatgctattcgaatttctactagcagtaagtcgtgtttagaaattatttttttatataccttttttccttctatgtacagtaggacacagtgtcagcgccgcgttgacggagaatatttgcaaaaaagtaaaagagaaagtcatagcggcgtatgtgccaaaaacttcgtcacagagagggccataagaaacatggcccacggcccaatacgaagcaccgcgacgaagcccaaacagcagtccgtaggtggagcaaagcgctgggtaatacgcaaacgttttgtcccaccttgactaatcacaagagtggagcgtaccttataaaccgagccgcaagcaccgaattgttcattgagcgccctctctctctgttttagagctagaaatagcaagttaaaataaggctagtccgttatcaacttgaaaaagtggcaccgagtcggtgctttttttttgacatatgttctgagagtacaatgatgaacctagattaatcaatgccaaagtctgaaaaatgcaccctcagtctatgatccagaaaatcaagattgcttgaggccctgttcggttgttccggattagagccccggattaattcctagccggattacttctctaatttatatagattttgatgagctggaatgaatcctggcttattccggtacaaccgaacaggccctgaaggataccagtaatcgctgagctaaattggcatgctgtcagagtgtcagtattgcagcaaggtagtgagataaccggcatcatggtgccagtttgatggcaccattagggttagagatggtggccatgggcgcatgtcctggccaactttgtatgatatatggcagggtgaataggaaagtaaaattgtattgtaaaaagggatttcttctgtttgttagcgcatgtacaaggaatgcaagttttgagcgagggggcatcaaagatctggctgtgtttccagctgtttttgttagccccatcgaatccttgacataatgatcccgcttaaataagcaacctcgcttgtatagttccttgtgctctaacacacgatgatgataagtcgtaaaatagtggtgtccaaagaatttccaggcccagttgtaaaagctaaaatgctattcgaatttctactagcagtaagtcgtgtttagaaattatttttttatataccttttttccttctatgtacagtaggacacagtgtcagcgccgcgttgacggagaatatttgcaaaaaagtaaaagagaaagtcatagcggcgtatgtgccaaaaacttcgtcacagagagggccataagaaacatggcccacggcccaatacgaagcaccgcgacgaagcccaaacagcagtccgtaggtggagcaaagcgctgggtaatacgcaaacgttttgtcccaccttgactaatcacaagagtggagcgtaccttataaaccgagccgcaagcaccgaattttctgtactagcctggcgtcgttttagagctagaaatagcaagttaaaataaggctagtccgttatcaacttgaaaaagtggcaccgagtcggtgctttttttttgcggccgcgaattcctgagagtacaatgatgaacctagattaatcaatgccaaagtctgaaaaatgcaccctcagtctatgatccagaaaatcaagattgcttgaggccctgttcggttgttccggattagagccccggattaattcctagccggattacttctctaatttatatagattttgatgagctggaatgaatcctggcttattccggtacaaccgaacaggccctgaaggataccagtaatcgctgagctaaattggcatgctgtcagagtgtcagtattgcagcaaggtagtgagataaccggcatcatggtgccagtttgatggcaccattagggttagagatggtggccatgggcgcatgtcctggccaactttgtatgatatatggcagggtgaataggaaagtaaaattgtattgtaaaaagggatttcttctgtttgttagcgcatgtacaaggaatgcaagttttgagcgagggggcatcaaagatctggctgtgtttccagctgtttttgttagccccatcgaatccttgacataatgatcccgcttaaataagcaacctcgcttgtatagttccttgtgctctaacacacgatgatgataagtcgtaaaatagtggtgtccaaagaatttccaggcccagttgtaaaagctaaaatgctattcgaatttctactagcagtaagtcgtgtttagaaattatttttttatataccttttttccttctatgtacagtaggacacagtgtcagcgccgcgttgacggagaatatttgcaaaaaagtaaaagagaaagtcatagcggcgtatgtgccaaaaacttcgtcacagagagggccataagaaacatggcccacggcccaatacgaagcaccgcgacgaagcccaaacagcagtccgtaggtggagcaaagcgctgggtaatacgcaaacgttttgtcccaccttgactaatcacaagagtggagcgtaccttataaaccgagccgcaagcaccgaattgtcctggaggatcctatgcggttttagagctagaaatagcaagttaaaataaggctagtccgttatcaacttgaaaaagtggcaccgagtcggtgctttttttttctttactagacaatttgagagtacaatgatgaacctagattaatcaatgccaaagtctgaaaaatgcaccctcagtctatgatccagaaaatcaagattgcttgaggccctgttcggttgttccggattagagccccggattaattcctagccggattacttctctaatttatatagattttgatgagctggaatgaatcctggcttattccggtacaaccgaacaggccctgaaggataccagtaatcgctgagctaaattggcatgctgtcagagtgtcagtattgcagcaaggtagtgagataaccggcatcatggtgccagtttgatggcaccattagggttagagatggtggccatgggcgcatgtcctggccaactttgtatgatatatggcagggtgaataggaaagtaaaattgtattgtaaaaagggatttcttctgtttgttagcgcatgtacaaggaatgcaagttttgagcgagggggcatcaaagatctggctgtgtttccagctgtttttgttagccccatcgaatccttgacataatgatcccgcttaaataagcaacctcgcttgtatagttccttgtgctctaacacacgatgatgataagtcgtaaaatagtggtgtccaaagaatttccaggcccagttgtaaaagctaaaatgctattcgaatttctactagcagtaagtcgtgtttagaaattatttttttatataccttttttccttctatgtacagtaggacacagtgtcagcgccgcgttgacggagaatatttgcaaaaaagtaaaagagaaagtcatagcggcgtatgtgccaaaaacttcgtcacagagagggccataagaaacatggcccacggcccaatacgaagcaccgcgacgaagcccaaacagcagtccgtaggtggagcaaagcgctgggtaatacgcaaacgttttgtcccaccttgactaatcacaagagtggagcgtaccttataaaccgagccgcaagcaccgaattcaaaactccagtcatgatcagttttagagctagaaatagcaagttaaaataaggctagtccgttatcaacttgaaaaagtggcaccgagtcggtgctttttttttcagtacattaaaaacctgcccttaaggccaattgttcaagattcattcaacaattgaaacatctcccatgattaaatcagtataaggttgctatggtcttgcttgacaaagtttttttttgagggaatttcaactaaatttttgagtgaaactatcaaatactgattttaaaaaatttttataaaaggaagcgcagagataaaaggccatctatgctacaaaagtacccaaaaatgtaatcctaaagtatgaattgcattttttttttgtttggacgaaaggaaaggagtattaccacaagaatgatatcatcttcatatttagatcttttttgggtaaagcttgagattctctaaatatagagaaatcagaagaaaaaaaaaccgtgttttggtggttttgatttctagcctccacaataactttgacggcgtcgacaagtctaacggacaccaagcagcgaaccaccagcgccgagccaagcgaagcagacggccgagacgttgacaccttcggcgcggcatctctcgagagttccgctccggcgctccacctccaccgctggcggtttcttattccgttccgttccgcctcctgctctgctcctctccacaccacacggcacgaaaccgttacggcaccggcagcacccagcacgggagaggggattcctttcccaccgttccttccctttccgccccgccgctataaatagccagccccatccccagcttttttccccaatctcatctcctctctcctgttgttcggagcacacgcacaatccgatcgatccccaaatccccttcgtctctcctcgcgagcctcgtggatcccagcttcaaggtacggcgatcgatcatcccccctccttctctctaccttcttttctctagactacatcggatggcgatccatggttagggcctgctagtttcccttcctgttttgtcgatggctgcgaggcacaatagatctgatggcgttatgacggctaacttgtcatgttgttgcgatttatagtccctttaggagatcagtttaatttctcggatggttcgagatcggtggtccatggttagtaccctaagatccgcgctgttagggttcgtagatggaggcgacctgttctgattgttaacttgtcagtacctgggaaatcctgggatggttctagctcgtccgcagatgagatcgatttcatgatcctctgtatcttgtttcgttgcctaggttccgtctaatctatccgtggtatgatgtagatgttttgatcgtgctaactacgtcttgtaaagttaattgtcaggtcataatttttagcatgcctttttttttgtttggttttgtctaattgggctgtcgttctagatcagagtagaagactgttccaaactacctgctggatttattgaacttggatctgtatgtgtgtcacatatcttcataaattcatgattaagatggattgaaatatcttttatctttttggtatggatagttctatatgttggtgtggctttgttagatgtatacatgcttagatacatgaagcaacgtgctgctactgtttagtaattgctgttcatttgtctaataaacagataaggatatgtatttatgttgctgttggttttgctggtactttgttggatacaaatgcttcaatacagaaaacagcatgctgctacgatttaccatttatctaatcttatcatatgtctaatctaataaacaaacatgcttttaaattatcttcatatgcttggatgatggcatacacagcggctatgtgtggttttttaaatacccagcatcatgggcatgcatgacactgctttaatatgctttttatttgcttgagactgtttcttttgtttatactgaccctttagttcggtgactcttctgcaggtcgactttaacttagcctaggatccatggcccagtccaagcacggcctgaccaaggagatgaccatgaagtaccgcatggagggctgcgtggacggccacaagttcgtgatcaccggcgagggcatcggctaccccttcaagggcaagcaggccatcaacctgtgcgtggtggagggcggccccttgcccttcgccgaggacatcttgtccgccgccttcatgtacggcaaccgcgtgttcaccgagtacccccaggacatcgtcgactacttcaagaactcctgccccgccggctacacctgggaccgctccttcctgttcgaggacggcgccgtgtgcatctgcaacgccgacatcaccgtgagcgtggaggagaactgcatgtaccacgagtccaagttctacggcgtgaacttccccgccgacggccccgtgatgaagaagatgaccgacaactgggagccctcctgcgagaagatcatccccgtgcccaagcagggcatcttgaagggcgacgtgagcatgtacctgctgctgaaggacggtggccgcttgcgctgccagttcgacaccgtgtacaaggccaagtccgtgccccgcaagatgcccgactggcacttcatccagcacaagctgacccgcgaggaccgcagcgacgccaagaaccagaagtggcacctgaccgagcacgccatcgcctccggctccgccttgccctccggactcagatctcgatagggtaccaatggccagttaacagatccagctgctgctgttctagggttcacaagtctgcctatttgtcttccccaatggagctatggttgtctggtctggtccttggtcgtgtcccgtttcattgtgtactatttacctgtaatgtgtatccttaagtctggtttgatggtgtctgaaacgttttgctgtggtagagcagcatggaagaactataatgaataagtgatccctaatcattgtgtccaaattttgcttctgctatacccttttgtgctgtttcttatgttttgcttaaaaatttgatctgacaaacaaatttgtctaaattatgctcttgttctgactgtgtactgtacacatttgtattgctaccggtttggcacatagttttctctttgattgcagatcaaacccttctgattgcagattgcttggctatggctgatgtgctcactgttcttctttagcttgtatattgctgatggtggcttggctacggctgaaaaagttgctgctgcgccgacttggcaactgttgctccagtaatgctttgtcctctcttcctagccgccgacttggcacttggcagctgttgctcctgtaatgcgttgttatctcttatctcttgagatgtactatgattttgaggctgtttgacttgtgccagattgccagtgctgatgctatattatctcaggtttttatgctagtatatgttttactgtgtgctgcctgtgtcgagttacgtaatctattgaaccgctatgcgtgttgatgccctgttgttgcttgccagattgatgcccctgttgcttgcagcttgcaagctgtagtgaaatcctaaaattcgaaaccaaatctattctgaacttttgaagatctgtgatgtccggaagaaaagattcaaacagataaacgggactctccagaatctataaaataaatgatcgacaaacgctttgctttggtaggcttcgtccgcaatgtgttattaagttgtctaagcgtcaatttgtttacaccacaatatatcctgccaccagccagccaacagctccccgaccggcagctcggcacaaaatcac

SEQ ID NO: 70 - DNA, 24 bp, Artificial sequence
  Synthetic
gttcttctgtactagcctggcgtc

SEQ ID NO: 71 - DNA, 24 bp, Artificial sequence
  Synthetic
attcgtcctggaggatcctatgcg

SEQ ID NO: 72 - DNA, 24 bp, Artificial sequence
  Synthetic
attccaaaactccagtcatgatca

SEQ ID NO: 73 - DNA, 24 bp, Artificial sequence
  Synthetic
gttcgatttcttaatcgttcttga

SEQ ID NO: 74 - DNA, 24 bp, Artificial sequence
  Synthetic
gttccgttaaatcatactacaact

SEQ ID NO: 75 - DNA, 24 bp, Artificial sequence
  Synthetic
attcgaggaagtgaggggatcagg

SEQ ID NO: 76 - DNA, 10808 bp, Artificial sequence
  Synthetic
cagtcacgacgttgtaaaacgacggccagtgagcgcgcgtaatacgactcactatagggcgaattggagctccaccgcggtggcggccgctctagaactagtggatcccccagcttgcatgcctgcagtgcagcgtgacccggtcgtgcccctctctagagataatgagcattgcatgtctaagttataaaaaattaccacatattttttttgtcacacttgtttgaagtgcagtttatctatctttatacatatatttaaactttactctacgaataatataatctatagtactacaataatatcagtgttttagagaatcatataaatgaacagttagacatggtctaaaggacaattgagtattttgacaacaggactctacagttttatctttttagtgtgcatgtgttctcctttttttttgcaaatagcttcacctatataatacttcatccattttattagtacatccatttagggtttagggttaatggtttttatagactaatttttttagtacatctattttattctattttagcctctaaattaagaaaactaaaactctattttagtttttttatttaataatttagatataaaatagaataaaataaagtgactaaaaattaaacaaataccctttaagaaattaaaaaaactaaggaaacatttttcttgtttcgagtagataatgccagcctgttaaacgccgtcgacgagtctaacggacaccaaccagcgaaccagcagcgtcgcgtcgggccaagcgaagcagacggcacggcatctctgtcgctgcctctggacccctctcgagagttccgctccaccgttggacttgctccgctgtcggcatccagaaattgcgtggcggagcggcagacgtgagccggcacggcaggcggcctcctcctcctctcacggcaccggcagctacgggggattcctttcccaccgctccttcgctttcccttcctcgcccgccgtaataaatagacaccccctccacaccctctttccccaacctcgtgttgttcggagcgcacacacacacaaccagatctcccccaaatccacccgtcggcacctccgcttcaaggtacgccgctcgtcctcccccccccccctctctaccttctctagatcggcgttccggtccatgcatggttagggcccggtagttctacttctgttcatgtttgtgttagatccgtgtttgtgttagatccgtgctgctagcgttcgtacacggatgcgacctgtacgtcagacacgttctgattgctaacttgccagtgtttctctttggggaatcctgggatggctctagccgttccgcagacgggatcgatttcatgattttttttgtttcgttgcatagggtttggtttgcccttttcctttatttcaatatatgccgtgcacttgtttgtcgggtcatcttttcatgcttttttttgtcttggttgtgatgatgtggtctggttgggcggtcgttctagatcggagtagaattctgtttcaaactacctggtggatttattaattttggatctgtatgtgtgtgccatacatattcatagttacgaattgaagatgatggatggaaatatcgatctaggataggtatacatgttgatgcgggttttactgatgcatatacagagatgctttttgttcgcttggttgtgatgatgtggtgtggttgggcggtcgttcattcgttctagatcggagtagaatactgtttcaaactacctggtgtatttattaattttggaactgtatgtgtgtgtcatacatcttcatagttacgagtttaagatggatggaaatatcgatctaggataggtatacatgttgatgtgggttttactgatgcatatacatgatggcatatgcagcatctattcatatgctctaaccttgagtacctatctattataataaacaagtatgttttataattattttgatcttgatatacttggatgatggcatatgcagcagctatatgtggatttttttagccctgccttcatacgctatttatttgcttggtactgtttcttttgtcgatgctcaccctgttgtttggtgttacttctgcaggtcgactctagaggatccatggcaccgaagaagaagcgcaaggtgatggacaagaagtacagcatcggcctcgacatcggcaccaactcggtgggctgggccgtcatcacggacgaatataaggtcccgtcgaagaagttcaaggtcctcggcaatacagaccgccacagcatcaagaaaaacttgatcggcgccctcctgttcgatagcggcgagaccgcggaggcgaccaggctcaagaggaccgccaggagacggtacactaggcgcaagaacaggatctgctacctgcaggagatcttcagcaacgagatggcgaaggtggacgactccttcttccaccgcctggaggaatcattcctggtggaggaggacaagaagcatgagcggcacccaatcttcggcaacatcgtcgacgaggtaagtttctgcttctacctttgatatatatataataattatcattaattagtagtaatataatatttcaaatatttttttcaaaataaaagaatgtagtatatagcaattgcttttctgtagtttataagtgtgtatattttaatttataacttttctaatatatgaccaaaacatggtgatgtgcaggtggcctaccacgagaagtacccgacaatctaccacctccggaagaaactggtggacagcacagacaaggcggacctccggctcatctaccttgccctcgcgcatatgatcaagttccgcggccacttcctcatcgagggcgacctgaacccggacaactccgacgtggacaagctgttcatccagctcgtgcagacgtacaatcaactgttcgaggagaaccccataaacgctagcggcgtggacgccaaggccatcctctcggccaggctctcgaaatcaagaaggctggagaaccttatcgcgcagttgccaggcgaaaagaagaacggcctcttcggcaaccttattgcgctcagcctcggcctgacgccgaacttcaaatcaaacttcgacctcgcggaggacgccaagctccagctctcaaaggacacctacgacgacgacctcgacaacctcctggcccagataggagaccagtacgcggacctcttcctcgccgccaagaacctctccgacgctatcctgctcagcgacatccttcgggtcaacaccgaaattaccaaggcaccgctgtccgccagcatgattaaacgctacgacgagcaccatcaggacctcacgctgctcaaggcactcgtccgccagcagctccccgagaagtacaaggagatcttcttcgaccaatcaaaaaacggctacgcgggatatatcgacggcggtgccagccaggaagagttctacaagttcatcaaaccaatcctggagaagatggacggcaccgaggagttgctggtcaagctcaacagggaggacctcctcaggaagcagaggaccttcgacaacggctccatcccgcatcagatccacctgggcgaactgcatgccatcctgcggcgccaggaggacttctacccgttcctgaaggataaccgggagaagatcgagaagatcttgacgttccgcatcccatactacgtgggcccgctggctcgcggcaactcccggttcgcctggatgacccggaagtcggaggagaccatcacaccctggaactttgaggaggtggtcgataagggcgctagcgctcagagcttcatcgagcgcatgaccaacttcgataaaaacctgcccaatgaaaaagtcctccccaagcactcgctgctctacgagtacttcaccgtgtacaacgagctcaccaaggtcaaatacgtcaccgagggcatgcggaagccggcgttcctgagcggcgagcagaagaaggcgatagtggacctcctcttcaagaccaacaggaaggtgaccgtgaagcaattaaaagaggactacttcaagaaaatagagtgcttcgactccgtggagatctcgggcgtggaggatcggttcaacgcctcactcggcacgtatcacgacctcctcaagatcattaaagacaaggacttcctcgacaacgaggagaacgaggacatcctcgaggacatcgtcctcaccctgaccctgttcgaggaccgcgaaatgatcgaggagaggctgaagacctacgcgcacctgttcgacgacaaggtcatgaaacagctcaagaggcgccgctacactggttggggaaggctgtcccgcaagctcattaatggcatcagggacaagcagagcggcaagaccatcctggacttcctcaagtccgacgggttcgccaaccgcaacttcatgcagctcattcacgacgactcgctcacgttcaaggaagacatccagaaggcacaggtgagcgggcagggtgactccctccacgaacacatcgccaacctggccggctcgccggccattaaaaagggcatcctgcagacggtcaaggtcgtcgacgagctcgtgaaggtgatgggccggcacaagcccgaaaatatcgtcatagagatggccagggagaaccagaccacccaaaaagggcagaagaactcgcgcgagcggatgaaacggatcgaggagggcattaaagagctcgggtcccagatcctgaaggagcaccccgtggaaaatacccagctccagaatgaaaagctctacctctactacctgcagaacggccgcgacatgtacgtggaccaggagctggacattaatcggctatcggactacgacgtcgaccacatcgtgccgcagtcgttcctcaaggacgatagcatcgacaacaaggtgctcacccggtcggataaaaatcggggcaagagcgacaacgtgcccagcgaggaggtcgtgaagaagatgaaaaactactggcgccagctcctcaacgcgaaactgatcacccagcgcaagttcgacaacctgacgaaggcggaacgcggtggcttgagcgaactcgataaggcgggcttcataaaaaggcagctggtcgagacgcgccagatcacgaagcatgtcgcccagatcctggacagccgcatgaatactaagtacgatgaaaacgacaagctgatccgggaggtgaaggtgatcacgctgaagtccaagctcgtgtcggacttccgcaaggacttccagttctacaaggtccgcgagatcaacaactaccaccacgcccacgacgcctacctgaatgcggtggtcgggaccgccctgatcaagaagtacccgaagctggagtcggagttcgtgtacggcgactacaaggtctacgacgtgcgcaaaatgatcgccaagtccgagcaggagatcggcaaggccacggcaaaatacttcttctactcgaacatcatgaacttcttcaagaccgagatcaccctcgcgaacggcgagatccgcaagcgcccgctcatcgaaaccaacggcgagacgggcgagatcgtctgggataagggccgggatttcgcgacggtccgcaaggtgctctccatgccgcaagtcaatatcgtgaaaaagacggaggtccagacgggcgggttcagcaaggagtccatcctcccgaagcgcaactccgacaagctcatcgcgaggaagaaggattgggacccgaaaaaatatggcggcttcgacagcccgaccgtcgcatacagcgtcctcgtcgtggcgaaggtggagaagggcaagtcaaagaagctcaagtccgtgaaggagctgctcgggatcacgattatggagcggtcctccttcgagaagaacccgatcgacttcctagaggccaagggatataaggaggtcaagaaggacctgattattaaactgccgaagtactcgctcttcgagctggaaaacggccgcaagaggatgctcgcctccgcaggcgagttgcagaagggcaacgagctcgccctcccgagcaaatacgtcaatttcctgtacctcgctagccactatgaaaagctcaagggcagcccggaggacaacgagcagaagcagctcttcgtggagcagcacaagcattacctggacgagatcatcgagcagatcagcgagttctcgaagcgggtgatcctcgccgacgcgaacctggacaaggtgctgtcggcatataacaagcaccgcgacaaaccaatacgcgagcaggccgaaaatatcatccacctcttcaccctcaccaacctcggcgctccggcagccttcaagtacttcgacaccacgattgaccggaagcggtacacgagcacgaaggaggtgctcgatgcgacgctgatccaccagagcatcacagggctctatgaaacacgcatcgacctgagccagctgggcggagacaagagaccacgggaccgccacgatggcgagctgggaggccgcaagcgggcaaggtaggtaccgttaacctagacttgtccatcttctggattggccaacttaattaatgtatgaaataaaaggatgcacacatagtgacatgctaatcactataatgtgggcatcaaagttgtgtgttatgtgtaattactagttatctgaataaaagagaaagagatcatccatatttcttatcctaaatgaatgtcacgtgtctttataattctttgatgaaccagatgcatttcattaaccaaatccatatacatataaatattaatcatatataattaatatcaattgggttagcaaaacaaatctagtctaggtgtgttttgcgaatgcggccgggctgcaggaattcgatagctttgagagtacaatgatgaacctagattaatcaatgccaaagtctgaaaaatgcaccctcagtctatgatccagaaaatcaagattgcttgaggccctgttcggttgttccggattagagccccggattaattcctagccggattacttctctaatttatatagattttgatgagctggaatgaatcctggcttattccggtacaaccgaacaggccctgaaggataccagtaatcgctgagctaaattggcatgctgtcagagtgtcagtattgcagcaaggtagtgagataaccggcatcatggtgccagtttgatggcaccattagggttagagatggtggccatgggcgcatgtcctggccaactttgtatgatatatggcagggtgaataggaaagtaaaattgtattgtaaaaagggatttcttctgtttgttagcgcatgtacaaggaatgcaagttttgagcgagggggcatcaaagatctggctgtgtttccagctgtttttgttagccccatcgaatccttgacataatgatcccgcttaaataagcaacctcgcttgtatagttccttgtgctctaacacacgatgatgataagtcgtaaaatagtggtgtccaaagaatttccaggcccagttgtaaaagctaaaatgctattcgaatttctactagcagtaagtcgtgtttagaaattatttttttatataccttttttccttctatgtacagtaggacacagtgtcagcgccgcgttgacggagaatatttgcaaaaaagtaaaagagaaagtcatagcggcgtatgtgccaaaaacttcgtcacagagagggccataagaaacatggcccacggcccaatacgaagcaccgcgacgaagcccaaacagcagtccgtaggtggagcaaagcgctgggtaatacgcaaacgttttgtcccaccttgactaatcacaagagtggagcgtaccttataaaccgagccgcaagcaccgaattgtacgtaacgtgcagtacgttttagagctagaaatagcaagttaaaataaggctagtccgttatcaacttgaaaaagtggcaccgagtcggtgctttttttttgcggccatcaagcttatcgataccgtcgacctcgagggggggcccggtacccagcttttgttccctttagtgagggttaattgcgcgcttggcgtaatcatggtcatagctgtttcctgtgtgaaattgttatccgctcacaattccacacaacatacgagccggaagcataaagtgtaaagcctggggtgcctaatgagtgagctaactcacattaattgcgttgcgctcactgcccgctttccagtcgggaaacctgtcgtgccagctgcattaatgaatcggccaacgcgcggggagaggcggtttgcgtattgggcgctcttccgcttcctcgctcactgactcgctgcgctcggtcgttcggctgcggcgagcggtatcagctcactcaaaggcggtaatacggttatccacagaatcaggggataacgcaggaaagaacatgtgagcaaaaggccagcaaaaggccaggaaccgtaaaaaggccgcgttgctggcgtttttccataggctccgcccccctgacgagcatcacaaaaatcgacgctcaagtcagaggtggcgaaacccgacaggactataaagataccaggcgtttccccctggaagctccctcgtgcgctctcctgttccgaccctgccgcttaccggatacctgtccgcctttctcccttcgggaagcgtggcgctttctcatagctcacgctgtaggtatctcagttcggtgtaggtcgttcgctccaagctgggctgtgtgcacgaaccccccgttcagcccgaccgctgcgccttatccggtaactatcgtcttgagtccaacccggtaagacacgacttatcgccactggcagcagccactggtaacaggattagcagagcgaggtatgtaggcggtgctacagagttcttgaagtggtggcctaactacggctacactagaagaacagtatttggtatctgcgctctgctgaagccagttaccttcggaaaaagagttggtagctcttgatccggcaaacaaaccaccgctggtagcggtggtttttttgtttgcaagcagcagattacgcgcagaaaaaaaggatctcaagaagatcctttgatcttttctacggggtctgacgctcagtggaacgaaaactcacgttaagggattttggtcatgagattatcaaaaaggatcttcacctagatccttttaaattaaaaatgaagttttaaatcaatctaaagtatatatgagtaaacttggtctgacagttaccaatgcttaatcagtgaggcacctatctcagcgatctgtctatttcgttcatccatagttgcctgactccccgtcgtgtagataactacgatacgggagggcttaccatctggccccagtgctgcaatgataccgcgagacccacgctcaccggctccagatttatcagcaataaaccagccagccggaagggccgagcgcagaagtggtcctgcaactttatccgcctccatccagtctattaattgttgccgggaagctagagtaagtagttcgccagttaatagtttgcgcaacgttgttgccattgctacaggcatcgtggtgtcacgctcgtcgtttggtatggcttcattcagctccggttcccaacgatcaaggcgagttacatgatcccccatgttgtgcaaaaaagcggttagctccttcggtcctccgatcgttgtcagaagtaagttggccgcagtgttatcactcatggttatggcagcactgcataattctcttactgtcatgccatccgtaagatgcttttctgtgactggtgagtactcaaccaagtcattctgagaatagtgtatgcggcgaccgagttgctcttgcccggcgtcaatacgggataataccgcgccacatagcagaactttaaaagtgctcatcattggaaaacgttcttcggggcgaaaactctcaaggatcttaccgctgttgagatccagttcgatgtaacccactcgtgcacccaactgatcttcagcatcttttactttcaccagcgtttctgggtgagcaaaaacaggaaggcaaaatgccgcaaaaaagggaataagggcgacacggaaatgttgaatactcatactcttcctttttcaatattattgaagcatttatcagggttattgtctcatgagcggatacatatttgaatgtatttagaaaaataaacaaataggggttccgcgcacatttccccgaaaagtgccacctaaattgtaagcgttaatattttgttaaaattcgcgttaaatttttgttaaatcagctcattttttaaccaataggccgaaatcggcaaaatcccttataaatcaaaagaatagaccgagatagggttgagtgttgttccagtttggaacaagagtccactattaaagaacgtggactccaacgtcaaagggcgaaaaaccgtctatcagggcgatggcccactacgtgaaccatcaccctaatcaagttttttggggtcgaggtgccgtaaagcactaaatcggaaccctaaagggagcccccgatttagagcttgacggggaaagccggcgaacgtggcgagaaaggaagggaagaaagcgaaaggagcgggcgctagggcgctggcaagtgtagcggtcacgctgcgcgtaaccaccacacccgccgcgcttaatgcgccgctacagggcgcgtcccattcgccattcaggctgcgcaactgttgggaagggcgatcggtgcgggcctcttcgctattacgccagctggcgaaagggggatgtgctgcaaggcgattaagttgggtaacgccagggttttcc

SEQ ID NO: 77 - DNA, 11140 bp, Artificial Sequence
  Synthetic
ttatttgccgactaccttggtgatctcgcctttcacgtagtgaacaaattcttccaactgatctgcgcgcgaggccaagcgatcttcttgtccaagataagcctgcctagcttcaagtatgacgggctgatactgggccggcaggcgctccattgcccagtcggcagcgacatccttcggcgcgattttgccggttactgcgctgtaccaaatgcgggacaacgtaagcactacatttcgctcatcgccagcccagtcgggcggcgagttccatagcgttaaggtttcatttagcgcctcaaatagatcctgttcaggaaccggatcaaagagttcctccgccgctggacctaccaaggcaacgctatgttctcttgcttttgtcagcaagatagccagatcaatgtcgatcgtggctggctcgaagatacctgcaagaatgtcattgcgctgccattctccaaattgcagttcgcgcttagctggataacgccacggaatgatgtcgtcgtgcacaacaatggtgacttctacagcgcggagaatctcgctctctccaggggaagccgaagtttccaaaaggtcgttgatcaaagctcgccgcgttgtttcatcaagccttacagtcaccgtaaccagcaaatcaatatcactgtgtggcttcaggccgccatccactgcggagccgtacaaatgtacggccagcaacgtcggttcgagatggcgctcgatgacgccaactacctctgatagttgagtcgatacttcggcgatcaccgcttccctcatgatgtttaactcctgaattaagccgcgccgcgaagcggtgtcggcttgaatgaattgttaggcgtcatcctgtgctcccgagaaccagtaccagtacatcgctgtttcgttcgagacttgaggtctagttttatacgtgaacaggtcaatgccgccgagagtaaagccacattttgcgtacaaattgcaggcaggtacattgttcgtttgtgtctctaatcgtatgccaaggagctgtctgcttagtgcccactttttcgcaaattcgatgagactgtgcgcgactcctttgcctcggtgcgtgtgcgacacaacaatgtgttcgatagaggctagatcgttccatgttgagttgagttcaatcttcccgacaagctcttggtcgatgaatgcgccatagcaagcagagtcttcatcagagtcatcatccgagatgtaatccttccggtaggggctcacacttctggtagatagttcaaagccttggtcggataggtgcacatcgaacacttcacgaacaatgaaatggttctcagcatccaatgtttccgccacctgctcagggatcaccgaaatcttcatatgacgcctaacgcctggcacagcggatcgcaaacctggcgcggcttttggcacaaaaggcgtgacaggtttgcgaatccgttgctgccacttgttaacccttttgccagatttggtaactataatttatgttagaggcgaagtcttgggtaaaaactggcctaaaattgctggggatttcaggaaagtaaacatcaccttccggctcgatgtctattgtagatatatgtagtgtatctacttgatcgggggatctgctgcctcgcgcgtttcggtgatgacggtgaaaacctctgacacatgcagctcccggagacggtcacagcttgtctgtaagcggatgccgggagcagacaagcccgtcagggcgcgtcagcgggtgttggcgggtgtcggggcgcagccatgacccagtcacgtagcgatagcggagtgtatactggcttaactatgcggcatcagagcagattgtactgagagtgcaccatatgcggtgtgaaataccgcacagatgcgtaaggagaaaataccgcatcaggcgctcttccgcttcctcgctcactgactcgctgcgctcggtcgttcggctgcggcgagcggtatcagctcactcaaaggcggtaatacggttatccacagaatcaggggataacgcaggaaagaacatgtgagcaaaaggccagcaaaaggccaggaaccgtaaaaaggccgcgttgctggcgtttttccataggctccgcccccctgacgagcatcacaaaaatcgacgctcaagtcagaggtggcgaaacccgacaggactataaagataccaggcgtttccccctggaagctccctcgtgcgctctcctgttccgaccctgccgcttaccggatacctgtccgcctttctcccttcgggaagcgtggcgctttctcatagctcacgctgtaggtatctcagttcggtgtaggtcgttcgctccaagctgggctgtgtgcacgaaccccccgttcagcccgaccgctgcgccttatccggtaactatcgtcttgagtccaacccggtaagacacgacttatcgccactggcagcagccactggtaacaggattagcagagcgaggtatgtaggcggtgctacagagttcttgaagtggtggcctaactacggctacactagaaggacagtatttggtatctgcgctctgctgaagccagttaccttcggaaaaagagttggtagctcttgatccggcaaacaaaccaccgctggtagcggtggtttttttgtttgcaagcagcagattacgcgcagaaaaaaaggatctcaagaagatcctttgatcttttctacggggtctgacgctcagtggaacgaaaactcacgttaagggattttggtcatgagattatcaaaaaggatcttcacctagatccttttaaattaaaaatgaagttttaaatcaatctaaagtatatatgagtaaacttggtctgacagttaccaatgcttaatcagtgaggcacctatctcagcgatctgtctatttcgttcatccatagttgcctgactccccgtcgtgtagataactacgatacgggagggcttaccatctggccccagtgctgcaatgataccgcgagacccacgctcaccggctccagatttatcagcaataaaccagccagccggaagggccgagcgcagaagtggtcctgcaactttatccgcctccatccagtctattaattgttgccgggaagctagagtaagtagttcgccagttaatagtttgcgcaacgttgttgccattgctgcagggggggggggggggggggttccattgttcattccacggacaaaaacagagaaaggaaacgacagaggccaaaaagcctcgctttcagcacctgtcgtttcctttcttttcagagggtattttaaataaaaacattaagttatgacgaagaagaacggaaacgccttaaaccggaaaattttcataaatagcgaaaacccgcgaggtcgccgccccgtaacctgtcggatcaccggaaaggacccgtaaagtgataatgattatcatctacatatcacaacgtgcgtggaggccatcaaaccacgtcaaataatcaattatgacgcaggtatcgtattaattgatctgcatcaacttaacgtaaaaacaacttcagacaatacaaatcagcgacactgaatacggggcaacctcatgtcccccccccccccccccctgcaggcatcgtggtgtcacgctcgtcgtttggtatggcttcattcagctccggttcccaacgatcaaggcgagttacatgatcccccatgttgtgcaaaaaagcggttagctccttcggtcctccgatcgttgtcagaagtaagttggccgcagtgttatcactcatggttatggcagcactgcataattctcttactgtcatgccatccgtaagatgcttttctgtgactggtgagtactcaaccaagtcattctgagaatagtgtatgcggcgaccgagttgctcttgcccggcgtcaacacgggataataccgcgccacatagcagaactttaaaagtgctcatcattggaaaacgttcttcggggcgaaaactctcaaggatcttaccgctgttgagatccagttcgatgtaacccactcgtgcacccaactgatcttcagcatcttttactttcaccagcgtttctgggtgagcaaaaacaggaaggcaaaatgccgcaaaaaagggaataagggcgacacggaaatgttgaatactcatactcttcctttttcaatattattgaagcatttatcagggttattgtctcatgagcggatacatatttgaatgtatttagaaaaataaacaaataggggttccgcgcacatttccccgaaaagtgccacctgacgtctaagaaaccattattatcatgacattaacctataaaaataggcgtatcacgaggccctttcgtcttcaagaattggtcgacgatcttgctgcgttcggatattttcgtggagttcccgccacagacccggattgaaggcgagatccagcaactcgcgccagatcatcctgtgacggaactttggcgcgtgatgactggccaggacgtcggccgaaagagcgacaagcagatcacgcttttcgacagcgtcggatttgcgatcgaggatttttcggcgctgcgctacgtccgcgaccgcgttgagggatcaagccacagcagcccactcgaccttctagccgacccagacgagccaagggatctttttggaatgctgctccgtcgtcaggctttccgacgtttgggtggttgaacagaagtcattatcgtacggaatgccaagcactcccgaggggaaccctgtggttggcatgcacatacaaatggacgaacggataaaccttttcacgcccttttaaatatccgttattctaataaacgctcttttctcttaggtttacccgccaatatatcctgtcaaacactgatagtttaaactgaaggcgggaaacgacaatctgatcatgagcggagaattaagggagtcacgttatgacccccgccgatgacgcgggacaagccgttttacgtttggaactgacagaaccgcaacgttgaaggagccactcagcaagctggtacgattgtaatacgactcactatagggcgaattgagcgctgtttaaacgctcttcaactggaagagcggttactaccggctggatggcggggccttgatcgtgcaccgccggcgtccggaggttaccggccagaatggcccggaccgaagactctcggtccgaagcttgcgatagcggccgcgcagaatttacggtccagcacgggcatgccgcgcgggctgactttgctccactgactcgatcatgtgcggattccatcgcggcgtagcgtagccaaccgcaacgcaaaccgacttcatcttttttttttattatgaacaaaaggagatcgagagaaacgtgaacggtaaataatatatctgatcccatgcatgcacgctgcctgggtcgatctcgctctcgctccgcccagacgaacatgcatgctggtcaggctcaacgctcaggcgggcaagctgtgggaggacatgggatgggagaggaggacacatgcatgctggccagtcaggcactgtgctggcacatgaggtagggataggggggccctcggccagtgtccaggccgcatgcatgcatgccccccctgctgctcgaccgaacaacgttggatgcctggattgatgcaacagtttggacggacggaccatacgttatgtaccagtaggtacctcactgactagctaatcgagctagttaccctatgaggtgacatgaagcgctcacggttactatgacggttagcttcacgactgttggtggcagtagcgtacgacttagctatagttccggacttaccgataacttcgtatagcatacattatacgaagttatggcgccgctagcctgcagtgcagcgtgacccggtcgtgcccctctctagagataatgagcattgcatgtctaagttataaaaaattaccacatattttttttgtcacacttgtttgaagtgcagtttatctatctttatacatatatttaaactttactctacgaataatataatctatagtactacaataatatcagtgttttagagaatcatataaatgaacagttagacatggtctaaaggacaattgagtattttgacaacaggactctacagttttatctttttagtgtgcatgtgttctcctttttttttgcaaatagcttcacctatataatacttcatccattttattagtacatccatttagggtttagggttaatggtttttatagactaatttttttagtacatctattttattctattttagcctctaaattaagaaaactaaaactctattttagtttttttatttaataatttagatataaaatagaataaaataaagtgactaaaaattaaacaaataccctttaagaaattaaaaaaactaaggaaacatttttcttgtttcgagtagataatgccagcctgttaaacgccgtcgacgagtctaacggacaccaaccagcgaaccagcagcgtcgcgtcgggccaagcgaagcagacggcacggcatctctgtcgctgcctctggacccctctcgagagttccgctccaccgttggacttgctccgctgtcggcatccagaaattgcgtggcggagcggcagacgtgagccggcacggcaggcggcctcctcctcctctcacggcaccggcagctacgggggattcctttcccaccgctccttcgctttcccttcctcgcccgccgtaataaatagacaccccctccacaccctctttccccaacctcgtgttgttcggagcgcacacacacacaaccagatctcccccaaatccacccgtcggcacctccgcttcaaggtacgccgctcgtcctcccccccccccctctctaccttctctagatcggcgttccggtccatgcatggttagggcccggtagttctacttctgttcatgtttgtgttagatccgtgtttgtgttagatccgtgctgctagcgttcgtacacggatgcgacctgtacgtcagacacgttctgattgctaacttgccagtgtttctctttggggaatcctgggatggctctagccgttccgcagacgggatcgatttcatgattttttttgtttcgttgcatagggtttggtttgcccttttcctttatttcaatatatgccgtgcacttgtttgtcgggtcatcttttcatgcttttttttgtcttggttgtgatgatgtggtctggttgggcggtcgttctagatcggagtagaattctgtttcaaactacctggtggatttattaattttggatctgtatgtgtgtgccatacatattcatagttacgaattgaagatgatggatggaaatatcgatctaggataggtatacatgttgatgcgggttttactgatgcatatacagagatgctttttgttcgcttggttgtgatgatgtggtgtggttgggcggtcgttcattcgttctagatcggagtagaatactgtttcaaactacctggtgtatttattaattttggaactgtatgtgtgtgtcatacatcttcatagttacgagtttaagatggatggaaatatcgatctaggataggtatacatgttgatgtgggttttactgatgcatatacatgatggcatatgcagcatctattcatatgctctaaccttgagtacctatctattataataaacaagtatgttttataattattttgatcttgatatacttggatgatggcatatgcagcagctatatgtggatttttttagccctgccttcatacgctatttatttgcttggtactgtttcttttgtcgatgctcaccctgttgtttggtgttacttctgcaggtcgactttaacttagcctagggaagttcctattccgaagttcctattctctagaaagtataggaacttcagatccaccgggatccaccatggttgaacaagatggattgcacgcaggttctccggccgcttgggtggagaggctattcggctatgactgggcacaacagacaatcggctgctctgatgccgccgtgttccggctgtcagcgcaggggcgcccggttctttttgtcaagaccgacctgtccggtgccctgaatgaactgcaggacgaggcagcgcggctatcgtggctggccacgacgggcgttccttgcgcagctgtgctcgacgttgtcactgaagcgggaagggactggctgctattgggcgaagtgccggggcaggatctcctgtcatctcaccttgctcctgccgagaaagtatccatcatggctgatgcaatgcggcggctgcatacgcttgatccggctacctgcccattcgaccaccaagcgaaacatcgcatcgagcgagcacgtactcggatggaagccggtcttgtcgatcaggatgatctggacgaagagcatcaggggctcgcgccagccgaactgttcgccaggctcaaggcgcgcatgcccgacggcgatgatctcgtcgtgacccatggcgatgcctgcttgccgaatatcatggtggaaaatggccgcttttctggattcatcgactgtggccggctgggtgtggcggaccgctatcaggacatagcgttggctacccgtgatattgctgaagagcttggcggcgaatgggctgaccgcttcctcgtgctttacggtatcgccgctcccgattcgcagcgcatcgccttctatcgccttcttgacgagttcttctgaggatccaccatggttaacctagacttgtccatcttctggattggccaacttaattaatgtatgaaataaaaggatgcacacatagtgacatgctaatcactataatgtgggcatcaaagttgtgtgttatgtgtaattactagttatctgaataaaagagaaagagatcatccatatttcttatcctaaatgaatgtcacgtgtctttataattctttgatgaaccagatgcatttcattaaccaaatccatatacatataaatattaatcatatataattaatatcaattgggttagcaaaacaaatctagtctaggtgtgttttgcgaatgcggccctagcgtatacgaagttcctattccgaagttcctattctccagaaagtataggaacttctgtacacctgagctgattccgatgacttcgtaggttcctagctcaagccgctcgtgtccaagcgtcacttacgattagctaatgattacggcatctaggaccgactagctaactaactagtaccgaggccggccccgcgggagctcggcgcgccctgcacgttacgtacgtacgaactaatatactccaccagctgatcactgatgagccgagccgccatgcattgtaatttataacatgtgcggctgtacgcttccatctcaaatacctttttatatatatattgtactttatagtctacgacataatctgccatggtaatttataagatgtgctttattgctcgttgttctgttctcatctgtgtccatggcatggcatggatacaaaatgtatgtatggccacgcatccaatctgtgacgttgtcaaggcagaggtccaaccgtccaagaccctcttgtgccgccctgtacttgcagtcagtgacgttgtgagaaaaagctgtgggtggtctccgcagagcgcgcgggccacgagagggagccccatctctcggccgaggggtacgggggctccagacacggtcctttggtttcttctgcctgtagcgagcggccccgccccccaccgcgctgctagcccggggattagaattaattcattccgattaatcgtggcctcttgctcttcaggatgaagagctatgtttaaacgtgcaagcgctactagacaattcagtacattaaaaacgtccgcaatgtgttattaagttgtctaagcgtcaatttgtttacaccacaatatatcctgccaccagccagccaacagctccccgaccggcagctcggcacaaaatcaccactcgatacaggcagcccatcagtccgggacggcgtcagcgggagagccgttgtaaggcggcagactttgctcatgttaccgatgctattcggaagaacggcaactaagctgccgggtttgaaacacggatgatctcgcggagggtagcatgttgattgtaacgatgacagagcgttgctgcctgtgatcaaatatcatctccctcgcagagatccgaattatcagccttcttattcatttctcgcttaaccgtgacaggctgtcgatcttgagaactatgccgacataataggaaatcgctggataaagccgctgaggaagctgagtggcgctatttctttagaagtgaacgttgacgatcgtcgaccgtaccccgatgaattaattcggacgtacgttctgaacacagctggatacttacttgggcgattgtcatacatgacatcaacaatgtacccgtttgtgtaaccgtctcttggaggttcgtatgacactagtggttcccctcagcttgcgactagatgttgaggcctaacattttattagagagcaggctagttgcttagatacatgatcttcaggccgttatctgtcagggcaagcgaaaattggccatttatgacgaccaatgccccgcagaagctcccatctttgccgccatagacgccgcgccccccttttggggtgtagaacatccttttgccagatgtggaaaagaagttcgttgtcccattgttggcaatgacgtagtagccggcgaaagtgcgagacccatttgcgctatatataagcctacgatttccgttgcgactattgtcgtaattggatgaactattatcgtagttgctctcagagttgtcgtaatttgatggactattgtcgtaattgcttatggagttgtcgtagttgcttggagaaatgtcgtagttggatggggagtagtcatagggaagacgagcttcatccactaaaacaattggcaggtcagcaagtgcctgccccgatgccatcgcaagtacgaggcttagaaccaccttcaacagatcgcgcatagtcttccccagctctctaacgcttgagttaagccgcgccgcgaagcggcgtcggcttgaacgaattgttagaca

SEQ ID NO: 78 - DNA, 5488 bp, Artificial Sequence
  Vector plasmid
ggaagttcctattccgaagttcctattctctagaaagtataggaacttcagatccaccgggatccccgatcatgcaaaaactcattaactcagtgcaaaactatgcctggggcagcaaaacggcgttgactgaactttatggtatggaaaatccgtccagccagccgatggccgagctgtggatgggcgcacatccgaaaagcagttcacgagtgcagaatgccgccggagatatcgtttcactgcgtgatgtgattgagagtgataaatcgactctgctcggagaggccgttgccaaacgctttggcgaactgcctttcctgttcaaagtattatgcgcagcacagccactctccattcaggttcatccaaacaaacacaattctgaaatcggttttgccaaagaaaatgccgcaggtatcccgatggatgccgccgagcgtaactataaagatcctaaccacaagccggagctggtttttgcgctgacgcctttccttgcgatgaacgcgtttcgtgaattttccgagattgtctccctactccagccggtcgcaggtgcacatccggcgattgctcactttttacaacagcctgatgccgaacgtttaagcgaactgttcgccagcctgttgaatatgcagggtgaagaaaaatcccgcgcgctggcgattttaaaatcggccctcgatagccagcagggtgaaccgtggcaaacgattcgtttaatttctgaattttacccggaagacagcggtctgttctccccgctattgctgaatgtggtgaaattgaaccctggcgaagcgatgttcctgttcgctgaaacaccgcacgcttacctgcaaggcgtggcgctggaagtgatggcaaactccgataacgtgctgcgtgcgggtctgacgcctaaatacattgatattccggaactggttgccaatgtgaaattcgaagccaaaccggctaaccagttgttgacccagccggtgaaacaaggtgcagaactggacttcccgattccagtggatgattttgccttctcgctgcatgaccttagtgataaagaaaccaccattagccagcagagtgccgccattttgttctgcgtcgaaggcgatgcaacgttgtggaaaggttctcagcagttacagcttaaaccgggtgaatcagcgtttattgccgccaacgaatcaccggtgactgtcaaaggccacggccgtttagcgcgtgtttacaacaagctgtaagagcttactgaaaaaattaacatctcttgctaagctgggggtggaacctagacttgtccatcttctggattggccaacttaattaatgtatgaaataaaaggatgcacacatagtgacatgctaatcactataatgtgggcatcaaagttgtgtgttatgtgtaattactagttatctgaataaaagagaaagagatcatccatatttcttatcctaaatgaatgtcacgtgtctttataattctttgatgaaccagatgcatttcattaaccaaatccatatacatataaatattaatcatatataattaatatcaattgggttagcaaaacaaatctagtctaggtgtgttttgcgaatgcgaccttcttatgtgcttctagtctccaaatgtggttgatagttattttgctctaagatcaacagtaatgaagtataaatcatcgttgtggtgtgctactcggttaattgagcattaacacacacaaacatgacgaggatggtataatctccaaaaatgtgtactttgttaggtgggaccctatagccttgattaatgtgctatgttaggcatgcctggaaacgtgtgacgcatatgttttgtgaacctgttgatattatatgtgcttttatattaccatattttattaaaatactaatatttattactagtaagatataacattctatctagcttaaaaactaaccataaatattccataataactagatttaccaaactaatatactaaatatacataataaatacaaaattaacaagacaataatcaatatttatgagcttaatatatttagacattatggttggtcgacgataatcatgctaacttttcgtaattgcttgattgaaatatgcttagaataatgcctctttgttctacatggcaaatagggaccattatggtgtaacaccctgggaaccacaaacaccccgaaatgctactaaactacacaactaaccttcatatataaaatttcgacagcatctcctttgaaaatttgcatagacgtggaagcaacagagtataaacagatatcatgataagaaaacatactagacattaataatctgctagaaatgggaagaatccctgcagtgcagcgtgacccggtcgtgcccctctctagagataatgagcattgcatgtctaagttataaaaaattaccacatattttttttgtcacacttgtttgaagtgcagtttatctatctttatacatatatttaaactttactctacgaataatataatctatagtactacaataatatcagtgttttagagaatcatataaatgaacagttagacatggtctaaaggacaattgagtattttgacaacaggactctacagttttatctttttagtgtgcatgtgttctcctttttttttgcaaatagcttcacctatataatacttcatccattttattagtacatccatttagggtttagggttaatggtttttatagactaatttttttagtacatctattttattctattttagcctctaaattaagaaaactaaaactctattttagtttttttatttaataatttagatataaaatagaataaaataaagtgactaaaaattaaacaaataccctttaagaaattaaaaaaactaaggaaacatttttcttgtttcgagtagataatgccagcctgttaaacgccgtcgacgagtctaacggacaccaaccagcgaaccagcagcgtcgcgtcgggccaagcgaagcagacggcacggcatctctgtcgctgcctctggacccctctcgagagttccgctccaccgttggacttgctccgctgtcggcatccagaaattgcgtggcggagcggcagacgtgagccggcacggcaggcggcctcctcctcctctcacggcaccggcagctacgggggattcctttcccaccgctccttcgctttcccttcctcgcccgccgtaataaatagacaccccctccacaccctctttccccaacctcgtgttgttcggagcgcacacacacacaaccagatctcccccaaatccacccgtcggcacctccgcttcaaggtacgccgctcgtcctcccccccccccctctctaccttctctagatcggcgttccggtccatgcatggttagggcccggtagttctacttctgttcatgtttgtgttagatccgtgtttgtgttagatccgtgctgctagcgttcgtacacggatgcgacctgtacgtcagacacgttctgattgctaacttgccagtgtttctctttggggaatcctgggatggctctagccgttccgcagacgggatcgatttcatgattttttttgtttcgttgcatagggtttggtttgcccttttcctttatttcaatatatgccgtgcacttgtttgtcgggtcatcttttcatgcttttttttgtcttggttgtgatgatgtggtctggttgggcggtcgttctagatcggagtagaattctgtttcaaactacctggtggatttattaattttggatctgtatgtgtgtgccatacatattcatagttacgaattgaagatgatggatggaaatatcgatctaggataggtatacatgttgatgcgggttttactgatgcatatacagagatgctttttgttcgcttggttgtgatgatgtggtgtggttgggcggtcgttcattcgttctagatcggagtagaatactgtttcaaactacctggtgtatttattaattttggaactgtatgtgtgtgtcatacatcttcatagttacgagtttaagatggatggaaatatcgatctaggataggtatacatgttgatgtgggttttactgatgcatatacatgatggcatatgcagcatctattcatatgctctaaccttgagtacctatctattataataaacaagtatgttttataattattttgatcttgatatacttggatgatggcatatgcagcagctatatgtggatttttttagccctgccttcatacgctatttatttgcttggtactgtttcttttgtcgatgctcaccctgttgtttggtgttacttctgcaggtcgactttaacttagcctaggatccaccggtcgccaccatggcctcctccgagaacgtcatcaccgagttcatgcgcttcaaggtgcgcatggagggcaccgtgaacggccacgagttcgagatcgagggcgagggcgagggccgcccctacgagggccacaacaccgtgaagctgaaggtgacgaagggcggccccctgcccttcgcctgggacatcctgtccccccagttccagtacggctccaaggtgtacgtgaagcaccccgccgacatccccgactacaagaagctgtccttccccgagggcttcaagtgggagcgcgtgatgaacttcgaggacggcggcgtggcgaccgtgacccaggactcctccctgcaggacggctgcttcatctacaaggtgaagttcatcggcgtgaacttcccctccgacggccccgtgatgcagaagaagaccatgggctgggaggcctccaccgagcgcctgtacccccgcgacggcgtgctgaagggcgagacccacaaggccctgaagctgaaggacggcggccactacctggtggagttcaagtccatctacatggccaagaagcccgtgcagctgcccggctactactacgtggacgccaagctggacatcacctcccacaacgaggactacaccatcgtggagcagtacgagcgcaccgagggccgccaccacctgttcctgtagcggcccatggatattcgaacgcgtaggtaccacatggttaacctagacttgtccatcttctggattggccaacttaattaatgtatgaaataaaaggatgcacacatagtgacatgctaatcactataatgtgggcatcaaagttgtgtgttatgtgtaattactagttatctgaataaaagagaaagagatcatccatatttcttatcctaaatgaatgtcacgtgtctttataattctttgatgaaccagatgcatttcattaaccaaatccatatacatataaatattaatcatatataattaatatcaattgggttagcaaaacaaatctagtctaggtgtgttttgcgaatacgaagttcctattccgaagttcctattcttcaaaaagtataggaacttctgtacacca

We claim:

1. A method of modifying a target site in the genome of a plant cell, comprising:
a. providing to the cell two distinct Rhizobiales bacteria,
i. wherein the first of the two bacteria comprises a first vector, wherein the first vector comprises a heterologous polynucleotide, wherein the heterologous polynucleotide is flanked by polynucleotides comprising homology to a nucleotide sequence at the target site,
ii. wherein the second of the two bacteria comprises a second vector, wherein the second vector comprises a polynucleotide encoding a Cas endonuclease, a guide RNA, at least one morphogenic factor, and an anti-regeneration factor;
wherein the ratio of the amounts of the first vector and the second vector or the ratio of the amount of the two distinct Rhizobiales bacteria is approximately 1:1 to about 10:1, and wherein the Cas endonuclease creates a double-strand break at or near the target site of the plant cell but the polynucleotide encoding the Cas endonuclease does not integrate into the genome of the same plant cell.

2. A method of modifying a target site in the genome of a plant cell, comprising:
a. providing to the cell at least two distinct Rhizobiales bacteria,
i. wherein the first of the two bacteria comprises a first vector, wherein the first vector comprises a gene encoding a guide RNA and a heterologous polynucleotide, wherein the heterologous polynucleotide is flanked by polynucleotides comprising homology to a nucleotide sequence at the target site,
ii. wherein the second of the two bacteria comprises a second vector, wherein the second vector comprises one or more polynucleotides encoding a Cas endonuclease, at least one morphogenic factor, and a gene conferring anti-regeneration properties;
wherein the ratio of the amounts of the first vector and the second vector or the ratio of the amount of the two distinct Rhizobiales bacteria is approximately 1:1 to about 10:1, and wherein the Cas endonuclease creates a double-strand break at or near the target site of the genome of the plant cell but the T-DNA comprising the Cas endonuclease does not integrate into the genome of the same plant cell.

3. A method of modifying a target site in the genome of a plant cell, comprising:
a. providing to the cell one Rhizobiales strain comprising first and second binary plasmids, wherein each of the two binary plasmids comprise distinct T-DNA sequences,
i. wherein the first binary plasmid comprises a low-copy ORI, and a T-DNA encoding a Cas endonuclease and a morphogenic factor,
ii. wherein the second binary plasmid comprises a higher copy ORI and comprises a T-DNA encoding a heterologous polynucleotide,
wherein the ratio of the amounts of the first plasmid and the second plasmid is approximately 1:1 to about 1:10, and wherein the Cas endonuclease creates a double-strand break at or near the target site of the plant cell but does not integrate into the genome of the same plant cell.

4. The method of any one of claims 1-3, wherein the heterologous polynucleotide is integrated through site-directed homologous recombination.

5. The method of any one of claims 1-3, wherein the plant cell is a monocot cell or a dicot cell.

6. The method of any one of claims 1-3, wherein the morphogenic factor is Wuschel.

7. The method of any one of claims 1-3, wherein the Cas endonuclease comprises fewer than about 1500, 1200, 100, 800 and 500 amino acids.

8. The method of any one of claims 1-3, wherein the heterologous polynucleotide is a template for homology-directed repair of a double-strand break at the target site.

9. The method of any one of claims 1-3, wherein at least one of the Rhizobiales is Agrobacterium.

10. The method of any one of claims 1-3, wherein the heterologous polynucleotide is a donor polynucleotide for integration at the target site.

11. A synthetic composition comprising two distinct Rhizobiales bacteria,
a. wherein the first of the two bacteria comprises a first vector, wherein the first vector comprises a heterologous polynucleotide, wherein the heterologous polynucleotide is flanked by polynucleotides comprising homology to a nucleotide sequence at the target site,
b. wherein the second of the two bacteria comprises a second vector, wherein the second vector comprises one or more polynucleotides encoding a Cas endonuclease, a guide RNA, and at least one morphogenic factor;
wherein the ratio of the amounts of the first vector and the second vector is approximately 1:1 to about 10:1.

12. A synthetic composition comprising two different Rhizobiales bacteria,
a. wherein the first of the two bacteria comprises a first vector, wherein the first vector comprises a gene encoding a guide RNA and a heterologous polynucleotide, wherein the heterologous polynucleotide is flanked by polynucleotides comprising homology to a nucleotide sequence at the target site,
b. wherein the second of the two bacteria comprises a second vector, wherein the second vector comprises one or more polynucleotides encoding a Cas endonuclease and at least one morphogenic factor;
wherein the ratio of the amounts of the first vector and the second vector is approximately 1:1 to about 10:1.

13. A synthetic composition comprising one Rhizobiales strain comprising first and second plasmids, wherein each of the two plasmids comprise one or more distinct T-DNA sequences,
a. wherein the first plasmid comprises a low-copy ORI and comprises a T-DNA encoding a Cas endonuclease and a morphogenic factor,
b. wherein the second plasmid comprises a higher copy ORI and comprises a T-DNA encoding a heterologous polynucleotide,
wherein the ratio of the amounts of the first plasmid and the second plasmid is approximately 1:1 to about 1:10.

14. The synthetic composition of any one of claims 11-13 is a plant cell.

15. The synthetic composition of claim 14, wherein the plant cell is a monocot cell or a dicot cell.

16. The synthetic composition of any one of claims 11-13, wherein at least one of the Rhizobiales is Agrobacterium.

17. The synthetic composition of any of claims 11-13, wherein the Cas endonuclease comprises fewer than about 1500, 1200, 100, 800 and 500 amino acids.

18. The synthetic composition of any of claims 11-13 further comprising an anti-regeneration factor.

19. The method of any one of claims 1-3, wherein the plant cell comprising in its genome the polynucleotide encoding the Cas endonuclease is not selected due to the presence or activity of the anti-regeneration factor.

20. The method of any one of claims 1-3, wherein the Cas endonuclease is a Type II or Type V CRISPR-Cas endonuclease.

21. The method of any one of claims 1-3, wherein the plant cell is a haploid plant cell.

22. The method of any one of claims 1-3, wherein the plant cell is a haploid plant cell and the DNA modification happens before or during chromosome doubling stage.

23. The method of any one of claims 1-3, wherein at least one of the Cas endonuclease, the morphogenic factor, and the anti-regeneration factor the plant cell comprises a heterologous cell penetrating peptide (CPP) or an intracellular transfusion domain.

24. A method of modifying a target site in the genome of a plant cell through endogenous activation of one or more genes, the method comprising providing to the cell (a) a first polynucleotide encoding a deactivated CRISPR-Cas polypeptide (dCas) that is capable of site-specifically binding to an endogenous target site comprising a polynucleotide involved in cellular regeneration, but incapable of introducing a double-strand break at the endogenous target site, wherein the dCas is operably linked to a transcriptional activator, the transcriptional activator capable of increasing the expression of the polynucleotide involved in cellular regeneration; (b) providing a second polynucleotide comprising a heterologous polynucleotide flanked by polynucleotides comprising homology to a nucleotide sequence at the target site to be modified; (c) providing a third polynucleotide encoding a Cas endonuclease, a guide RNA, and an anti-regeneration factor;
wherein the ratio of the amounts of the polynucleotide comprising the Cas endonuclease and the polynucleotide comprising the heterologous polynucleotide is approximately 1:1 to about 1:10, and wherein the Cas endonuclease creates a double-strand break at or near the target site of the plant cell but the polynucleotide encoding the Cas endonuclease does not integrate into the genome of the same plant cell.

25. The method of claim 24, wherein the dCas is fused to a transcriptional activation domain capable of initiating transcription from an endogenous morphogenic gene is WUSCHEL, BBM or a combination thereof.

26. The method of claim 24, wherein the polynucleotides are provided through one or more strains of Rhizobiales.

27. The method of claim 24, wherein the polynucleotides are provided through particle bombardment.

28. The method of claim 26, wherein the polynucleotides are present in one or more T-DNAs in the same Agrobacterium strain or two or more distinct Agrobacteria strains.

29. The method of claim 24, wherein the dCas polypeptide is a Type II or a Type V CRISPR-Cas polypeptide.

30. A synthetic composition comprising (a) a first polynucleotide encoding a deactivated CRISPR-Cas polypeptide (dCas) that is capable of site-specifically binding to an endogenous target site comprising a polynucleotide involved in cellular regeneration, but incapable of introducing a double-strand break at the endogenous target site, wherein the dCas is operably linked to a transcriptional activator, the transcriptional activator capable of increasing the expression of the polynucleotide involved in cellular regeneration; (b) providing a second polynucleotide comprising a heterologous polynucleotide flanked by polynucleotides comprising homology to a nucleotide sequence at the target site to be modified; (c) providing a third polynucleotide encoding a Cas endonuclease, a guide RNA, and an anti-regeneration factor.

31. The synthetic composition of claim 30, wherein one or more of the dCas is fused to a cell penetrating peptide.

32. A method of regeneration of a genome modified plant, the method comprising providing one or more polynucleotides that encode a site-specific DNA modifying agent and optionally, a morphogenic factor to a plant cell, wherein the DNA modifying agent and optionally, the morphogenic factor diffuses or is transported into one or more adjacent plant cells; modifying the genome of the one or more adjacent plant cells; regenerating the one or more adjacent plant cells into one or more genome modified plants, wherein the one or more genome modified plants do not comprise the polynucleotide sequence encoding the DNA modifying agent and optionally the morphogenic factor in the absence of a separate segregation step by crossing with another plant.

33. The method of claim 32, wherein the DNA modifying agent is a CRISPR-Cas polypeptide that is capable of moving from one cell to another as a polypeptide or in the form of an RNA sequence capable of being translated into a polypeptide.

34. The method of claim 32, wherein the DNA modifying agent is a CRISPR-Cas polypeptide and is operably linked to a cell penetrating peptide.

35. The method of claim 32, wherein the optional morphogenic factor is operably linked to a cell penetrating peptide.

36. The method of claim 32, wherein the cell that receives the polynucleotide encoding the DNA modifying agent is not selected, but the genome modified cell is regenerated into a genome modified plant.

37. The method of claim 32, wherein the DNA modifying agent is a CRISPR-Cas polypeptide and the guide RNA is encoded by the same polynucleotide that encodes the CRISPR-Cas polypeptide.

38. The method of claim 32, wherein the optional morphogenic factor is encoded by an expression construct that is distinct from the polynucleotide that encodes the DNA modifying agent.

39. The method of claim 32, wherein the polynucleotide that encodes the DNA modifying agent, a guide RNA and the optional morphogenic factor are present in one or more distinct expression cassettes.

40. The method of claim 32, wherein the DNA modifying agent is a CRISPR-Cas deactivated polypeptide (dCas).

41. The method of claim 32, further comprising a heterologous donor polynucleotide.

42. The method of claim 32, wherein the polynucleotide that encodes the DNA modifying agent and the optional morphogenic factor are present in the plant cell at a ratio of about 1:1 to about 1:5, 1:8, 1:10 and to about 1:100.

43. The method of claim 32, wherein the DNA modifying agent is a base editor.
